United States Patent Application Publication US 2001/0051335 A1 - sequence listing, part 2

SEQ ID NO: 5234 - DNA, 284 bp, Zea mays
  misc_feature: Incyte ID No: 700356068H1
  unsure 126, 172, 184-205: a, t, c, g, or other
ctgacagtgacaggtcggctgcggtggttgcagatgctcctccgcagcaggaaatggtagcagcaaacggaacgggcccaacccgcagctggtggtggacgggcacaagacgattcttgaagaggnccccggagaagaaaacggcaccctttctgccgccaattatgctggnaatggcagcatnnnnnnnnnnnnnnnnnnnnnnactaccttgtatcagggaggtgatgtgctaccgaacaggccgacaagtatatttgagaacgattggcttgggccgggaa

SEQ ID NO: 5235 - DNA, 73 bp, Zea mays
  misc_feature: Incyte ID No: 700356069H1
  unsure 46, 49, 55, 58-60, 64, 67: a, t, c, g, or other
caagcaggttactttccacaggaagaagaatctgcagtactatganatntctgcnccnnngcanctncaacgt

SEQ ID NO: 5236 - DNA, 279 bp, Zea mays
  misc_feature: Incyte ID No: 700356070H1
  unsure 81, 83, 163, 211, 218: a, t, c, g, or other
acgctgtctggccagcggcgttgcccgaccacccgttccacaagaagcaggatgctgtcgcgccggcgggttgcaggacantnagatgcacgacgcggtcaagccggcaggggagccggatcccggatacgtcatgtatccggcatggagccccgtccgcccntaatcgtcgatttgttgttggagaacgacgacgctccgccggcaacgngaatgcnacatgcattacatgctcgcggtcccatgcgatattaagcactagtagaggaagtgtgtgat

SEQ ID NO: 5237 - DNA, 282 bp, Zea mays
  misc_feature: Incyte ID No: 700356072H1
  unsure 14, 20, 22: a, t, c, g, or other
caactaaaggagancgagangngactttttctcgcgtttccttctctagccagccttgtctgtcccctcctcgtttattctctctctctcttttttttcgttcgcttccgaggaataatacccaaaaacaaaaaaacaaaggggctcaagacttcatcatgcatgcatgcataacacctcgagtaggagttgaagtacatgatcatgatggtatatatatagaggaagcatgtctatctaataagtccctcatccaaaattgttctttatgtcatgtatatg

SEQ ID NO: 5238 - DNA, 279 bp, Zea mays
  misc_feature: Incyte ID No: 700356074H1
  unsure 86-87, 116, 119, 238: a, t, c, g, or other
agggaaccgtgttgttctatttggtggggaaggtgttaacatgcagccgatgaatgacacgtttgtattggatttaaacgctagcnntccagagtggaggcatataaatgtgagcncantcctccaggtcgctggggccatactctgtcatgcttaaatggctcttggttggttgtttttggtggatgtggaaggcagggtctgcttaacgatgtattcatgttggatttggatgcanaacaaccaacctggcgtgagatacctggagttgcaccccca

SEQ ID NO: 5239 - DNA, 97 bp, Zea mays
  misc_feature: Incyte ID No: 700356075H1
  unsure 34-36, 84, 86, 90-91: a, t, c, g, or other
ttttttgatgcatagtaaccccccatctttattnnntgcggtggcctgggtcctgggtttcaggtttatttcacacagaaaggnangggnntagctc

SEQ ID NO: 5240 - DNA, 202 bp, Zea mays
  misc_feature: Incyte ID No: 700356076H1
  unsure 87, 103, 172-173, 176, 187, 189, 191, 196, 201: a, t, c, g, or other
agcggaacacgggaacggcggaagcaaacaactagaaattccccagcccggttctttgcgtgcggttgatctcgtcggaggcccggncgcggttccccaatcngccatcgaattcgatggcggccaacgccgggaataagatccgcaacgccaagctggttcttcttggagnngcnggcgctggcanancnacccnccacnc

SEQ ID NO: 5241 - DNA, 281 bp, Zea mays
  misc_feature: Incyte ID No: 700356077H1
tcctgacgagaaggtgatatctgtgaacgaaatgagagatactctagcttcactgtagctatttcgttagaaggttcgcatgtccgttggtttgcttgcgcatataagttgacctgattcagcatcatcttaggttcttgatcctcactgaaccaactatctgatatgtgatcccttaccaattatctgattcatggtctgtcgtggaacctttaagggcttgttcaatctatttggattgggtgggatgagtgagtttcaatccaaataagttaaaatct

SEQ ID NO: 5242 - DNA, 283 bp, Zea mays
  misc_feature: Incyte ID No: 700356081H1
  unsure 23, 67, 75, 86-87, 221, 228: a, t, c, g, or other
gccaccaaaatgaaattcggaanacgatctctgcatttgcccgacttcagaaatatgcagaattcangacaaganatagacagaanncttgatgtacacttccagagaagaattgcagaagtactcgataaacacttatctatggtccaaagggatcatgaacaaaaatcccagattgttgaacgccgaataagagatgatgcagctcttgaagaagctanaagaganagcaagctgttaaggaagaaaagttaaggcagaaagagcccagcaagaagcagag

SEQ ID NO: 5243 - DNA, 281 bp, Zea mays
  misc_feature: Incyte ID No: 700356082H1
  unsure 95, 134, 149, 152, 269: a, t, c, g, or other
ccgaaccttggcgtctgccctaccaaccgcagcagcgacactagaatggccgcggcgccgtcatccctcgcgtcctcccacctctccccaatcgnggcggtgtccactcccgccgtcccacatcagcttcgcanccggctgctcccgcngcngcgcccagcgcatcgttgccatggctggatccggcaagttcttcgtcggaggcaactggaatgcaatggaacaaaggactccattagcaaacttgtctctgaatgaatgctgctacnttgaaatgatgt

SEQ ID NO: 5244 - DNA, 280 bp, Zea mays
  misc_feature: Incyte ID No: 700356086H1
  unsure 56, 181: a, t, c, g, or other
cctgtggcacttgggctgtttgaatctgaaagtaaggatagttggaaatggttcancgagaagttgcagacagctataggatcaccccatggtctagtaatatccacagatgcaggaaaaggcatagacagtgcattaaccaatgccttcaacaatggtgttgagcaccgagaatgtgtgngacacctatttaagaattttcagaaaaggtttcatggtgaagtgtttgaaagaaaccttggccagcagcaagagcatataggaggacagtccatgataa

SEQ ID NO: 5245 - DNA, 278 bp, Zea mays
  misc_feature: Incyte ID No: 700356087H1
  unsure 10: a, t, c, g, or other
gttgaagaanctcttgcttttcggtcttcagcaactgttactttgatgaagtccctgcaagagactatttcttcgcagcaagctagaagtgagtctttgtctttagctttgaatggacaaaagtcaaatgaagatgttattgttgcccttcgaaatcataatgattgcttgaaagaggtggcagagaatgcgagtccaagccatctctattatcaacgagaagcacaaaaggtatctgatgagattgaggctttaaaagcaaccatcaagggagctac

SEQ ID NO: 5246 - DNA, 281 bp, Zea mays
  misc_feature: Incyte ID No: 700356088H1
  unsure 185: a, t, c, g, or other
aaacggagaaagatcaagcgagaacagactttagaagctggggaatatgcaccttctgctccacagcctccctcccatggatctggcagctcacaattgtctgacatacgagaaagagaaaggaaaggggtaatttcacagcatcgtatttcacacgctgatgaccttcctaggacacatggcanggacatgacaagcaagtcaagtcgtcgagagtctgaccaaatgcacgagagggaatgggaagaggaaaagcgaccaagaatgaaacgaaaaggaag

SEQ ID NO: 5247 - DNA, 279 bp, Zea mays
  misc_feature: Incyte ID No: 700356089H1
caaagccgcagagatgatttggtatctctaggctatgtgcttttgtattttctccgaggaagccttccttggcagggactaaaagccgcaacaaaggcacagaagtatgacaagatatgtgagaaaaagatatcgactcctatcgaggtcttatgcaaatcctgtccggtccagttttcatcttacttccattattgccattcattggcatttgatcagcgacctgactatgcatttgtgaagcgacttttccgtgactgtttatcagccaagattatg

SEQ ID NO: 5248 - DNA, 285 bp, Zea mays
  misc_feature: Incyte ID No: 700356094H1
  unsure 6, 16, 24, 27-28, 33-34, 36-37, 42-43, 48, 88, 132, 143, 239, 260, 268,: a, t, c, g, or other
cgagcngaagcactantccgagcncanngaagnnannctcgnncgcancatcgtccgaggtcgtgcagctgtgccacgagaacggagngatgcacagggacctgaagccggagaacttcctgttcgtgaacnagtcggaggantcacctctcaaagccatcgattcggcctctccgtgttcttcaagcctggagatcggttcaccgaagtggttggcagcgggtgttacatggctccanaggttctcaagagaagctagnggccaganatagacgtgtggngcnc

SEQ ID NO: 5249 - DNA, 287 bp, Zea mays
  misc_feature: Incyte ID No: 700356095H1
  unsure 99, 102: a, t, c, g, or other
gatgtactggaccttggtgccatcgcaaacccaatgttcaagctgaaggggcctacaatgctgcaaggcagctacagccctgcgtttcccctgaagcanccnccagaaggacatgaggttagcgcttgctctgggagatgagaacgccgtcgccatgcccgtctcagcagctgccaatgaggcgttcaagaaggcgaggagcctggggctgggagaccaggatttttcggcggtctatgaggttgtgaagggcgcgggtggttctggatctggccagccgtgataga

SEQ ID NO: 5250 - DNA, 291 bp, Zea mays
  misc_feature: Incyte ID No: 700356104H1
agcagagattggtccgctacgatgctggcctggaggtctatgcttatcaagatccattggagatatcgatgttggcgaatttattgtccctgttccatatgtgaagcaagtgaagttgtcaaatgctggaggaagacttattattgcttcagatggcatttgggatgcattatcctcagaagccgctgctaagtcttgcagaggtttgcctgctgagcttgccgcaaagcaagttgttaaggaggcactcaggacaagagggctaaaggatgatacaacttgcattgttgt

SEQ ID NO: 5251 - DNA, 292 bp, Zea mays
  misc_feature: Incyte ID No: 700356105H1
  unsure 220: a, t, c, g, or other
gggatatgatcactgaagctgtgcttgatcaggttcttggtgagaagacgtttcgagaaatttggaaagtggttcatctcgcttcatttttcggaccagttggcaggatcctacaagaaggtccttacattcaagtttgtattgccagatgcaagcaacatgtcagagatgacaagattggtttctcttgtgccatactacattgatttggttgggcgtnataagctcagtctcatgctcgctctaaaactggatggagctagaacgaaggctgctcaggaagctttaggga

SEQ ID NO: 5252 - DNA, 257 bp, Zea mays
  misc_feature: Incyte ID No: 700356108H1
  unsure 71, 86, 140: a, t, c, g, or other
tacgccgccgcgacggcgctgctagctagtctttggtgttgcaggtgttcgattcctgattccaaattccngactccaaactcggntcttcaatcgacagattccgatttacatcccaaagctcttcggattgaaatccngccgcgacccaagagataagagtatttgggattagtagatagggagggtagataggatagtagaatagaagaggagcactttcgctgatgattacggcggaggagaagagccccgaa

SEQ ID NO: 5253 - DNA, 85 bp, Zea mays
  misc_feature: Incyte ID No: 700356110H1
  unsure 35, 38-41, 70, 72, 75, 78, 81: a, t, c, g, or other
gatttgaactcttcaatctcttgcactcaaagctngtnnnngatagttaagcgtgcataagttaacttcnanaanaanagnggag

SEQ ID NO: 5254 - DNA, 297 bp, Zea mays
  misc_feature: Incyte ID No: 700356114H1
  unsure 128, 137, 142, 148, 150, 152, 161-162, 171: a, t, c, g, or other
ggtaacaaagttgatgtagaggcgcaccatgcctttaaagggaacatcccgtactttgagacgtctgctaaggatggaacgaacgtggaagatgccttccagtgtattgtaaagaatgctctgaagantgaaccggnggaanatttgnangnccccaaatnncgggtatgnggtaggtgccaaccgggctcagagatcatctggctgctgttaagacatgaggcatccacgaggcgtggtgatcatcatcggctatgcagtgaccaaacaatacctcaacattgctgggcctccatg

SEQ ID NO: 5255 - DNA, 239 bp, Zea mays
  misc_feature: Incyte ID No: 700356117H1
  unsure 16, 27, 46, 48: a, t, c, g, or other
ttagctgaaactaccngcgggcccgcntcacgctgacgcgtaaaancntaatgcatgcatgggcaccgcacagggcacaaatcaataacagctctcttttaaataatctgcatgcttattcgcttgcataagcatgcacacgtagtagatcgtgcatgtgtagggcgagcatgtttactttcatcccgggcggccggggttgtgtcgtcgtgcgagttgccgtgaagatgtactatgcc

SEQ ID NO: 5256 - DNA, 54 bp, Zea mays
  misc_feature: Incyte ID No: 700356119H1
  unsure 14, 24, 46-47, 51: a, t, c, g, or other
taagcgatgttgcnggcacagttntctcagatgcgccctgctgtannaatnaca

SEQ ID NO: 5257 - DNA, 115 bp, Zea mays
  misc_feature: Incyte ID No: 700356120H1
  unsure 2, 46, 57, 60, 62, 64, 72, 79, 86, 99-100, 106: a, t, c, g, or other
cngaaaggtgacgcactccttttcttcaaccttaacccagagggcngcaacgactcngtnangntccatggntggttgnccggtcnataaaaggcgagnnatggtnggctacgaa

SEQ ID NO: 5258 - DNA, 306 bp, Zea mays
  misc_feature: Incyte ID No: 700356122H1
  unsure 170, 177, 188, 190, 196-198, 222, 224: a, t, c, g, or other
gacatgggataagctccagctcgcggcgagggttattgttgccattgagaacccgcaagacatcatcgtcccagtccggcccgcccctacggccagcgtgctgtcctcaagttcgcgcagtacactggcgcccatgccatcgctgggaggcacacccctggtaccttcancaaatcnagttccaagancntctttnnncgaagccttcggctggttcatccntnaactggacccaaggactgaccatcagccaatcaaggagtctgctctggggaacatcccgaccattgccttctgcgacatgga

SEQ ID NO: 5259 - DNA, 297 bp, Zea mays
  misc_feature: Incyte ID No: 700356127H1
  unsure 46, 183, 275: a, t, c, g, or other
aacagcagagcagaggtcaacaagacgagacaagagaatgcctgtnagcaggatcgccgtgggtgctccgggcgaggctgtcccaccccgacaccgccaaggccgccgtcgccgagttcatctccatgctcatcttcgtcttcgccggctcaggatcgggcatggccttcagtaagctcacgnacggcggcgccaccactcccgccggcctcatcgccgcgtctctggcgcacgccctcgccctcttcgtggccgtctccgtgggtgccaacatntccggcggccacgtgaaccctg

SEQ ID NO: 5260 - DNA, 293 bp, Zea mays
  misc_feature: Incyte ID No: 700356129H1
  unsure 59, 86: a, t, c, g, or other
aaagaacacacaaaatgagggttcttgtagagaagctgttagtctctgtgtttttagcngcattctattcagggtgcatggtcgtntctctagaatatgatcacacggcaagcatcgagtgccttggcgacccaatgaaacccttgtacaagggcggcattgtccagaacagcgagttcaacagcggactgatgggctggtcgacacaccggaacgtcaaggccggcgtgagcagatcgccgtccggcaacaagtttgcagtggtgcatggggcgggaagctacgtgagcagc

SEQ ID NO: 5261 - DNA, 293 bp, Zea mays
  misc_feature: Incyte ID No: 700356130H1
  unsure 154, 156, 160, 165, 169-170, 174, 184, 194, 203, 206, 221, 236: a, t, c, g, or other
cgagaatggagccaggaagttctggatacatggaacgggagcattagggtgcatgcctcagaagctttctatgccgagggatgacgacagcgacctcgatgagcatggatgcatcgcaagcattaataatgtctgcaagaagttcaattccttncnaatngaagnttgnncganctgcgtttgnccctgaaaanttcgactancgnctttgtggatatgtncgctatcaagtatgntcttgttgccaaccacacgaaatatgggattgagaagccattgatgacatgttgtgg

SEQ ID NO: 5262 - DNA, 295 bp, Zea mays
  misc_feature: Incyte ID No: 700356132H1
  unsure 49, 73, 88, 139: a, t, c, g, or other
ctccccgccatcaacgctctccatggaagtcgagtccgcgatgctcgcntcgtccctaaaccccgccccgatntctaccgcgtccgcnacaacccgatttccagcgtcctccaccccgaatcgccgccccggctctctncatggaaggcgcgtctgcgacagcccgatctccgtggaaggcgtgtcctcctccccagatcgtcgtcccggctctctccacgcccgtgacagcctgctctctatggaaggtgagtctgcgatgctcacgtggatgggtaccccgcccccgctctct

SEQ ID NO: 5263 - DNA, 289 bp, Zea mays
  misc_feature: Incyte ID No: 700356133H1
  unsure 2: a, t, c, g, or other
gnagattcatatcgccgaagggtgttcttcaagtacgagaaaaggattaggacgcgcagcccccagagaagtctttgagtacttcgcatccgtccacagcccggaaggtgagatgcacatgttacctacggacctgatgagggcagttgttcccattttccccccatcggagtccaaaattgtcagggaagggagattgaggggggagcgccaccctggcgagctacaatgtgccccgtctgactttttcatgttatcgatacaaatgctgatggagtcatctcctttt

SEQ ID NO: 5264 - DNA, 240 bp, Zea mays
  misc_feature: Incyte ID No: 700356134H1
  unsure 71, 90, 92: a, t, c, g, or other
aagcttttggttctgatgattttcggaagattcccaatggtgtaaatggtcttgaggaacggatgcatatnactttgggacagcatggtncnagactggcaagatttctgtaaccgactatgtcagagtgacaagcacagaatgcgccaagaccttcaacatattccctcggaaaggagcaatcctggaaggatctgacgcagatatcataatcctgaaccctgaaaggagctttgtgtt

SEQ ID NO: 5265 - DNA, 286 bp, Zea mays
  misc_feature: Incyte ID No: 700356136H1
  unsure 71: a, t, c, g, or other
agagagcaaaagaggcggagaggtctataggctgtacgatgtaggaggccagagaaacgagagaaggaaangggatccatcttttccgaaggtgttaatgctgtaatattctgtgctgccattagcgagtatgatcagatgttatttgaggatgagacaaagaacagaatgatggagactaaagaactcttgattgggtgctaaagcaaagatgttttgagaaaacctcattcatgttatttcttaacaatttgacatattgagagaaaaatacaaaaggtccctt

SEQ ID NO: 5266 - DNA, 71 bp, Zea mays
  misc_feature: Incyte ID No: 700356138H1
  unsure 2, 20, 24, 27, 37, 58, 61, 67: a, t, c, g, or other
anatatttgtggtgtaggantggnganccgactgtcnccgtctgtcaaggtttctaantgngtcttntggg

SEQ ID NO: 5267 - DNA, 296 bp, Zea mays
  misc_feature: Incyte ID No: 700356140H1
agaaacaagcgcacaagatcaaatacctcgccgccaacaatggcctccaggtcctccatccttgctcggccatggtgatgctggctgcgctattcgttgttggtttgtgcaccacccccctcaccttccaggtcggcaagggatccaagcctggccacctgatcctcacccccaatgttgccaccatatccgacgtggagatcaaagagcacggtggcgatgacttctcctttacgctcaaggagggcccgactggcacctggacgctcgacaaccaaggccccgctcaagtaccc

SEQ ID NO: 5268 - DNA, 293 bp, Zea mays
  misc_feature: Incyte ID No: 700356141H1
ctgcgtcatcagccccgtcgtcttctggatcttctacaaggcgtacgacatcgggatggaggaaggctaacccggcgccgtacgccaagatctaccggggcatcgcgctgctaggcgtcaacggctggaaccagctgcccaagtactgcctccgcttctgcctcgccttcttcctgctcgccgtcgccatctgcgcgctcaaggaggtggccaaggcgcggcggtggtgggtgcaggactacatcccgagcgcgctgggaatggcggtgcccttcttcctcggctcgttcttc

SEQ ID NO: 5269 - DNA, 287 bp, Zea mays
  misc_feature: Incyte ID No: 700356143H1
  unsure 14, 75, 77, 194, 207, 210, 212, 226, 233, 259, 263, 266, 272-273, 278,: a, t, c, g, or other
ccacagctgcgtanctcgtcgcgctggtcctcgtggccacggccatagccgccgctcccggcgttgggtttgtcntnacctgccgcatctactgcgacaactgccgcgccgggttcgagacaaacgtgtcccacgccatccaaggcgcgacggtggagatggagtgccgccacttcgagtcgcagcaggtccangacaaggcggagncangnagggcccggcggtngtacacnatggagatcagcgggaccaccaggangaanctncgagtnnggctntcaaaaanc

SEQ ID NO: 5270 - DNA, 85 bp, Zea mays
  misc_feature: Incyte ID No: 700356145H1
  unsure 3, 21, 27, 34, 36, 46, 52, 69, 77, 82: a, t, c, g, or other
cgncaacgaggtgagcaaganggcggngaacttncnagcgcagtanggaggnagagaggaggagtaggnaagtgggnaaagnggg

SEQ ID NO: 5271 - DNA, 195 bp, Zea mays
  misc_feature: Incyte ID No: 700356146H1
  unsure 146, 158, 162, 164-165: a, t, c, g, or other
gtagccaaagagagatgatgatagattgtctttctggctctgatggcaaggagggtattgctaaagcagccagtttactttgctcaacttacctcaatggtgatactcatggagatgacaaaaggaaaccagcatttacagaagcngatcatgggggnaccncnngctgtaggttgtggtggaccccaaccccct

SEQ ID NO: 5272 - DNA, 287 bp, Zea mays
  misc_feature: Incyte ID No: 700356151H1
tcagggcttcctcctgagactgtgttccagccattgctcaaggataatcttgttgccaaagggatagtaactttccattcattactgagtttttcaaggagtaccttgaggaaaacagcttggatgatttgattgcacttttgaagaaaggcaaaatggaggacaatctgttggacttcttcccatcagctaagagatcttctgaggctttatctgagcatttcaccaaagaaggtctgactagccttgttgagtacaacgaaaagaagatgtttgaggttaaactt

SEQ ID NO: 5273 - DNA, 285 bp, Zea mays
  misc_feature: Incyte ID No: 700356152H1
  unsure 26, 136: a, t, c, g, or other
agcaccgcacggagagcaagcaaganagcaaccaccgcactgccattacctaacaatggcccgcgcctacgtgtttctcgtcgtgctcctcctggccgctgtcatcgtggcaccgttcgcgggagcgacgcgtgtngacgtcgttgagggcaggtccatggcgtccgccgacgcgccggaggccgccgcaccatcacccgggcctgactccgccttcgtcaccggatcctcgtcggatgcgccctccagcagcagttctcggactagatagctagccgctcgacg

SEQ ID NO: 5274 - DNA, 286 bp, Zea mays
  misc_feature: Incyte ID No: 700356153H1
  unsure 260, 265, 268, 275: a, t, c, g, or other
ctctcagctgctcaacaccgcagacaagtccagtcctctccctcccctcaatctagcgccgccactcgcggcccaccacgccgccgcaccgccgctggtgaacgaatccgtccatcccgtacaccagccatgtcctgacacactgacacacacctggtggaggaggaggcgccacctccgtccgccggcggtgcaggggaggagctggccatcctcagggtggcgttgggctccggcaagctgcgcatcgagggttgctnagttnaancggcgcnagccgactgca

SEQ ID NO: 5275 - DNA, 205 bp, Zea mays
  misc_feature: Incyte ID No: 700356155H1
  unsure 158, 166, 172, 181, 185, 188, 194, 199: a, t, c, g, or other
ctacaaagtagggtcgtgtatctacagcaggtaagttgaagttgatggcgcctcttgtccggccagacctgtggggctgtttattttagttcaacacgtggatcattccctcagtgatgggggtatagcagtcgttcgacaccttttttacacatttnaccatttngactgncaaaacttncggnatnaacttnggaangggggg

SEQ ID NO: 5276 - DNA, 292 bp, Zea mays
  misc_feature: Incyte ID No: 700356156H1
  unsure 2, 4, 254: a, t, c, g, or other
angnagttattgccggtcttgatcgtgctgtgttgaacatgaagaagggcgaggttgctcttgtccacaaattccctccctgaatatgcatttggttcaactgagtcaaagcaggatcttgctgttgttccacctaacagcacagtaatatatgaagttgagcttatttcatttgtgaaggacaaggagtcgtgggactgaacaatgaagagaagattgaggctgctggtaagaagaaagaggaagggaatgcntgttcaaatcgggcaaatatgctagagcttccaagcga

SEQ ID NO: 5277 - DNA, 291 bp, Zea mays
  misc_feature: Incyte ID No: 700356157H1
  unsure 7: a, t, c, g, or other
gcaaganttctcggcttctcgcaagtcgcgacagagaaagaggcggagttgcggagaagatgcagagcagcagcatgaagagggagatcagcgaggcccacaacaccattcgcttcggcatcaacgccggcgtcaaagcggacctcgccccgccgcacccgctccagtctaccatccaatcggtaaggattcgtcgttctccttcgtttcgtggttcacgcgtggtgtcgcatcgggcggctcgacgaggcggacaaagccggtggccagtgcgtccaccacctaggggcg

SEQ ID NO: 5278 - DNA, 285 bp, Zea mays
  misc_feature: Incyte ID No: 700356158H1
  unsure 226, 258, 273, 278, 283: a, t, c, g, or other
cacagccagtcagccacatcactagctatctgtgcagaggcaatggcgtccaaggttgagctggtggtggaggtcaagtccccggctgacaagctgtgggcggcgctgcgtgactcgacggagctgttccccaagatcttccccgagcagtacaagagcatcgagaccgtcgagggcgacggcaagtcggccggcaccgtccgcctcctcaagtaacgaggcggtnccctaatgctgacgttcgccaaggagaatttnaaagggaacgacganaacangtttntc

SEQ ID NO: 5279 - DNA, 225 bp, Zea mays
  misc_feature: Incyte ID No: 700356159H1
  unsure 9, 56-57, 92, 174, 207-208, 212, 214-216, 221: a, t, c, g, or other
ccgctcgancccgccgttcactaatgccgcaatcaagacgcttcagagcatcaggnnctccgagacgttcatagtgaagcataggagggatnatgtggatctgcatcgcactaccgagcaagagagggataacattgagcatgaagttggtgtttttgtaaaagcatgcaaggnacagattgatatcttaaagaacaggatccacanncatncnnngcgtngatg

SEQ ID NO: 5280 - DNA, 286 bp, Zea mays
  misc_feature: Incyte ID No: 700356160H1
  unsure 63, 233, 267-268, 278: a, t, c, g, or other
ggcttctccacagagttcgttgcccgcgcatgggacctcacccaggacgacgccgccaagctncgtctccaccccagcccggatccggcattgtcagggtcaaggacgggcacaagatgcccgaggcgcgcgacgaggacaggcagggcctggtcctcaactgcctagaggcgccgcttgacgtcgacatcaagaacggagggcgcgtcgtggtctcaacacccagaactgcngctcgtccaaggaggtcgggctcggtgctctttnnggattcgagnccattcct

SEQ ID NO: 5281 - DNA, 288 bp, Zea mays
  misc_feature: Incyte ID No: 700356163H1
  unsure 36, 133, 141-143, 146, 148, 152, 157-158, 162-163, 166, 172: a, t, c, g, or other
agcaatgagctctcctctcaagctgacattggttcncccacagtaccacgctgtaatgagattgttggcagcgagtcagctgatcaatcagggcagtaggtgatgctctgagtggtttgcttttagtagaggnaatttaannnttnangggngggcnnttcnngantggtgnggactatatagtgatttgcccagtagacaactgaaagtgaaagttaaagatcgaagtgtggattgtcacaacagatgcagagacaaaagttagccaaccttctagtttgcaagaat

SEQ ID NO: 5282 - DNA, 198 bp, Zea mays
  misc_feature: Incyte ID No: 700356167H1
  unsure 4, 15, 102, 126, 152, 158, 160-162, 166, 168, 176, 178-179, 186,: a, t, c, g, or other
cganaaggtaggtgnggttgctgccctacagaatcctttttaaaaatttgtcaccatcagatattctacctaatggatgcaccccaaatagatccatagcanagactcagcagagactcacatcangtcccctgtccttctgttccacacancatacncnnnccangntgacaggntnngaatgangaannncnttnt

SEQ ID NO: 5283 - DNA, 288 bp, Zea mays
  misc_feature: Incyte ID No: 700356171H1
ttcggcaggcgacacgctggagtatgagatgtgctgcagcaagggcctaagaccttcactcagcgacatctgctggaagcagccgatctgaggagaacatggctccttcagtggttcagccatcacaattggagccatcctcttagaccgtctccgacagtttactcacccctcttagtcgattgttatttaagtgcagtctctcggagatgcaattacagtccatcctctctttctttcccctttctcaaagagctaggaccttgctcgactgagcatcaggctgta

SEQ ID NO: 5284 - DNA, 281 bp, Zea mays
  misc_feature: Incyte ID No: 700356172H1
  unsure 2, 20, 41, 71, 77, 92, 94-97, 246, 261, 269: a, t, c, g, or other
gntcttctgaattgcttttncttaatgtccctcaagacccncctcagcctggctttcccaaagggcagttnttaaanctgaggggctcgctnannnnggctgtttccaggagcctcagaatggttcaggcccttgccagtcatggcacccgcctgtcactgtggctgcgtctggtaaccacagattgggggggccacgcctaaacagtgtccgtgcattctgagaaaagctttttccaatatacantctgcttttctacantctcagtnccaggggcataa

SEQ ID NO: 5285 - DNA, 282 bp, Zea mays
  misc_feature: Incyte ID No: 700356174H1
  unsure 74, 95, 99, 131, 148, 263, 277-278, 280-281: a, t, c, g, or other
gtcatctcctcctcctcagaaacccaccaaccccgtccagccgcgggctgtctcggccgtcgccgccggcggcngccgccctatcccggtccttnaggngagggaggttggccatggccttcaacaagatnaaggtcgccaaccccancgtcgagatggacggcgatgagatgaccagggtgttctggaaatctatcaaggacaagcttatattccctttcgtagacctcgacatcaaatattttgacctcgggcttccacanaattgccgcccggnngnng

SEQ ID NO: 5286 - DNA, 285 bp, Zea mays
  misc_feature: Incyte ID No: 700356177H1
  unsure 284: a, t, c, g, or other
cttcctctcccacgcaccgcgccaaggaaggcagagagagatcgccgctcctcttctctccgtcggtggtgcggttgaccgccctcctcgagcgagatctcgctgcagtccctcgagatctggtcacagatctatccgacaagatggtgaagatctgctgcatcggtgctggctatgtcggtggcccaaccatggcggtcattgccctcaagtgcccagacattgaggttgtcgttgttgacatctccaagccccgcattgaggcatggaacagggacccccgnt

SEQ ID NO: 5287 - DNA, 237 bp, Zea mays
  misc_feature: Incyte ID No: 700356180H1
  unsure 21: a, t, c, g, or other
tgaggagtacgacgtgatcantgttggggacggggctcaaggagtgcatcatcagcggcctcctctccgtcgatggcctcaaggtccttcacatggacaggaatgactactacggaggagaatcttcgtccctgaatctaaccaagctctggaacaggttcaagggcaacgacagccctcccgagcacctgggcgtcacaaagagtacaacgtcgacatggtgcccaagttcatgat

SEQ ID NO: 5288 - DNA, 281 bp, Zea mays
  misc_feature: Incyte ID No: 700356183H1
  unsure 84-85, 107, 187, 234: a, t, c, g, or other
cctttccatgtcatcgtatctccagccaaacaccgcacgggttcagagagagagtgaggcgggggcagaaattgttccgccagnncccgctgtcaacttcgcctganagccgggcactcgcggggtgtctcgtgaggttttcgtggccgtccggggaggggacgaccgcggtagtgtctggaattcnacgccggactttggtctccgccgtgcaccgtgggcagccaggtctanccttgggtcgctgcggtcacgaggatccgaagaatcaccctagtaat

SEQ ID NO: 5289 - DNA, 286 bp, Zea mays
  misc_feature: Incyte ID No: 700356185H1
  unsure 97: a, t, c, g, or other
aagattaggccaggggtcaagctgttcctgtatgattttgacttgaagcttctgtatggcgtgtacaagggcagcatcacatggtgggctgaacctngtccatgaagcatttaatgggaagttccctgcacaggttaagtttaagattgataaagattgccgtcctctccctgagagtagtctcaagcaagccatcaaggaaaattacaatgcaaagagcaaatttgatcccagagctcacccacaaaacaagtccaaaggttacttttgctgtttaagcctgtta

SEQ ID NO: 5290 - DNA, 213 bp, Zea mays
  misc_feature: Incyte ID No: 700356186H1
  unsure 205: a, t, c, g, or other
gctaccctcgtcgtcgtctcactcaccccgccttcacgcctccctcaccaaataaggtcccgccctttatccgacattcacaggggggacaggaaatcagcggccatggcctcgattccggcgacgaccttcgccgtcatcttatccgtcctcttctgtgccgcggctggcaccgccgtcgacaacgacctccccgactaggtantcagggcc

SEQ ID NO: 5291 - DNA, 288 bp, Zea mays
  misc_feature: Incyte ID No: 700356187H1
  unsure 116: a, t, c, g, or other
ctcagaagctcgaaaccatcactgctgcatttaaatttacgtcaatgttacaagctccattgcatggttttggcattttggttcgatgttgagttcaatggaccagtacgccaganatcgaagaagcaacctagtcaatcattggatgagaacacccaaaatgccagcccaagcaataggaagagaaaaccagatgtctctattgttctttcaactgcaccagaggatgcccctactcactggcagcagacccttttgtacttgtttgaacctatagaactaaacaaa

SEQ ID NO: 5292 - DNA, 288 bp, Zea mays
  misc_feature: Incyte ID No: 700356188H1
gtcaagcaacgtcaccttcgacaacctgagagaccgctaccacacgcaatgcgaccccaggctgaacgcgttcccagtccctggagctcgccttcatactcgccgagaagcttaggaagcggaggatgcggcggtcgtcggtggcgtctgggctcggcggcagcatcttgcccttgccgccctttggcttttgatgtcttgcacgctggctgtgtgcatgcagggtgcagtgcaggggtgtggtaggagaatcttacgttgtcgtttgccttgctatgtagtatgtaa

SEQ ID NO: 5293 - DNA, 285 bp, Zea mays
  misc_feature: Incyte ID No: 700356190H1
  unsure 3, 40, 49, 52, 57, 72, 82, 92, 94, 99, 104, 116, 148, 193, 195-196, 212,: a, t, c, g, or other
gtnatctcctcctcctcagaaacccaccaaccccgtccanccgccggcngtntcggncgtcgccgacgcagncgaccgcccnatcccggtcntncaggngaacnaggttggccatngccttcaacaagatcaaggtcgccaaccccancgtcgagatggacggcgatgagatgaccagggtgttctggaatcnanncaaggaccaagcttanattccctttcgtagacctcgacatcaaatattttgacctcgggcttccacacaactnannngaacngngcaag

SEQ ID NO: 5294 - DNA, 288 bp, Zea mays
  misc_feature: Incyte ID No: 700356193H1
  unsure 45, 49, 69, 100: a, t, c, g, or other
cttcctctcccacgcaccgcgccaaggaaggcagagagagatcgncgcnccctcttctctccgtcggtngtgcggttgaaccgccctccttcgagcgagntctcgctgcagtccctcgagatctggtcacagatctatccgacaagatggtgaagatctgctgcatcggtgctggctatgtcggtggcccaaccatggcggtcattgccctcaagtgcccagacattgaggttgtcgttgttgacatctccaagccccgcattgaggcatggaacagcgacaccctcc

SEQ ID NO: 5295 - DNA, 240 bp, Zea mays
  misc_feature: Incyte ID No: 700356196H1
  unsure 37, 54, 56, 74, 84, 121, 207: a, t, c, g, or other
cagatggtgaagagtacaacgtgatcgtgttgagggncggggctcaaggagtgnancatcagcggcctcctctncgtcgatggnctcaaggtccttcacatggacaggaatgactactacngaggagaatcttcgtccctgaatctaaccaagctctggaacaggttcaagggcaacgacagccctcccgagcacctaggcgtcaanaaagggtaaacgtcgacatggtgcccaagttca

SEQ ID NO: 5296 - DNA, 216 bp, Zea mays
  misc_feature: Incyte ID No: 700356205H1
gtggtgagtccgcctttcgtttttctgcagcaggtcaaggggctgctgcggctggacttcgccgtcgcagcgcagaactgctgggtgcgcaagggcggcgcctttcaccggcgagatcagtgctgagatgctggtaaacctgcaggtgccctgggtcattttgggacattctgagcgcagagctctgttgggtgaatccagtgattttgttgctga

SEQ ID NO: 5297 - DNA, 180 bp, Zea mays
  misc_feature: Incyte ID No: 700356209H1
  unsure 2, 10, 36-37: a, t, c, g, or other
cncctatgangagatcaaggctaccctctgcctcgnncttgaccgcagccttgatctcatcataggtggcagacttctcaagcctaacagtcagagggtagcctcaagggcatacctgggttatgtcgaggaggaccttgtttccaccgatttccagggtgacagcaggtctagcatctt

SEQ ID NO: 5298 - DNA, 262 bp, Zea mays
  misc_feature: Incyte ID No: 700356210H1
atagagctcaacaccatttcagcatcatttcctgggcttggttccttagttagtgatcttcacaggtccttaattaaacaatatgggacttctttaagtctagaacacaagagggttcctgcaaatgcggctagcactcaattttctgaagcattggcccaagcatggtctgagtttaatattgacagtgctgtaattatgatgattgttcagccagaagagagaaatatgtatgatcaatactggcttccaaacatttgca

SEQ ID NO: 5299 - DNA, 206 bp, Zea mays
  misc_feature: Incyte ID No: 700356216H1
gtctttaggaatgatgttgcagcagcagcgaagaagaagaaggcagaaggcgaggcgccacgttgcgggtgctaggaacaaaggcaaccttctacaactgcacaattgaaggtggacaaggcgccctgtatgaccagatggggctgcactacttcaagtcctgcaccatcaggggaaccatcgacttcatctttggctctgccaag

SEQ ID NO: 5300 - DNA, 213 bp, Zea mays
  misc_feature: Incyte ID No: 700356217H1
  unsure 204-205, 211: a, t, c, g, or other
gccagttctgtcgcggtgaacctggtggtggttctacctagaggattcttcttttttcgactgttcgggttggtttgtatttagcttcccttattataggtttgtgataaaagttattaccggatggtggtgaaatattcgttagaacatgataataatgactatagattctttttgtacataggtctctggtgctaacctaanngaaaanaa

SEQ ID NO: 5301 - DNA, 110 bp, Zea mays
  misc_feature: Incyte ID No: 700356219H1
aacaatccttgcacccctcccctgcgtcaccccaccatatccggccagcccaacgaaaatgttcgcgcgccacagctgcggttcctcttctacattccttcgccgtcgct

SEQ ID NO: 5302 - DNA, 249 bp, Zea mays
  misc_feature: Incyte ID No: 700356223H1
  unsure 50, 97, 99: a, t, c, g, or other
cgaggagacgctcaagcgcctcgtctcgcagctcggcaagtcgcgggagnaggtcttcgacgcgcttcaagagccagaccgtcgacctcgtcttcancncccaccctacacagtccgtgaggaggtctcttctccagaagcacggcaggatccgtaactgcctgcggcagcttctatgccaaggacatcactgctgacgacaagcaggagcttgatgaggcacttcagagggagattcaagctgctttt

SEQ ID NO: 5303 - DNA, 289 bp, Zea mays
  misc_feature: Incyte ID No: 700356224H1
  unsure 33-34, 36, 56, 190: a, t, c, g, or other
cgatccgtcatggcgactgctgcgccattgttnntntcccacggtctcctcctccnccctctccctggcgctcggcgcccatggcgtgaacgtgaagcccggggagcaccacatcctcaacaggcagagcttccccccggggttcgtcttcggcacggcgtcgtcggcgtaccaggtggaggggaacacncacaggtacgggcgcgggccctgcatctgggacaccttcctcaagtatccaggcactactcctgataacgcgaccgcggacgtgacagtcgacgagtac

SEQ ID NO: 5304 - DNA, 97 bp, Zea mays
  misc_feature: Incyte ID No: 700356227H1
  unsure 74, 88-94: a, t, c, g, or other
caaaccgaaaagaaaagaggaaagtgggatagctccaatctcttcttccttcgtcattcctctcccgtaggttnctactctccctccnnnnnnntca

SEQ ID NO: 5305 - DNA, 260 bp, Zea mays
  misc_feature: Incyte ID No: 700356228H1
  unsure 243: a, t, c, g, or other
gtgaacatgaggccactcgaatcgaagcattgcattggttcttcactttgctggatcgatattgtgctgagttcttggctacctgaacgatatttttgatccactcctaaatgcactttctgatccttcggacgcggttgtcctattagtattggaggttcatgcacgcatagctgaagaatctcaccacttccatcatcttgtatcctacctgatccgcaccttccacaacaaccattttgncactggagaaacgtggt

SEQ ID NO: 5306 - DNA, 199 bp, Zea mays
  misc_feature: Incyte ID No: 700356229H1
gccttgtgttcgtggggggtgtgtggcatattagctagcggataagcggccggccgaagagcaaccgcagtgagaagaagaagctcggatcggaggaggtcggcatggggaggggacgcgtcgagctgaagcggatcgagaacaagatcaaccgccagtcactttctccaagcgccgcaacggcctgctcaagaaggcc

SEQ ID NO: 5307 - DNA, 258 bp, Zea mays
  misc_feature: Incyte ID No: 700356234H1
  unsure 125, 176-177: a, t, c, g, or other
cacgatatatgactgggacattgtatggaaaagcacaatccttggctcttttactgttactgttgaatctgaggtaccgagtggaccaatttggcatacacttgacagcacatcaggccaggtgncgtcttcatattaaagtaatcaaggttcatgaaagttcctccagggcaatnnatagctcagctgaggctggtgctcgtagaaggatttccttggataagcaaggtcctactgtagttcatcaaaagccaggtc

SEQ ID NO: 5308 - DNA, 284 bp, Zea mays
  misc_feature: Incyte ID No: 700356235H1
gaaccttgttagcaagagcattgctgtccagactgagattggaggagtggctattagaataggtgggatggctaaaggttctggaatgattcacccaaatatggcaacaatgcttggtgttttgaccacagatgctcaagtcagcagtgatgtctggagagaaatgatccggatgtcagtgagtagaagtttcaaccaaattacagtggatggtgatactagtaccaatgactgtgttattgctatggcaagtgggttgtcggtttatctggaattcaaagtct

SEQ ID NO: 5309 - DNA, 215 bp, Zea mays
  misc_feature: Incyte ID No: 700356236H1
ggctgataacccactttatggatcttcactgattgattatgcccatattgagcaatggattgactttgctgcaacagagattgatgcaaacattggaaagtggttgtacccacggatggggttttatccccatgctggtgtggtagaagaatcaactattgctgcctgaagagagcattgggttctctgagcacccatcttgcatcaaacacatt

SEQ ID NO: 5310 - DNA, 283 bp, Zea mays
  misc_feature: Incyte ID No: 700356240H1
gaggaagtccccgagctccaggacatgggtggcccagtcgaaggtggtttcagcgttgcgttcgaccccctcgacggctccagcattgtcgacaccaacttcaccgtgggaaccatcttcggagtctggcccggcgacaagctgaccggagtgaccggcggcgaccaggtcgctgccgcgatgggcatctacggccctcgcacgacctacattgtcgccctcaaggattgccctgggacgcacgagttcctcctcctcgacgaaggtaaatggcagcatgtga

SEQ ID NO: 5311 - DNA, 179 bp, Zea mays
  misc_feature: Incyte ID No: 700356241H1
accggggatccgaggggtggggtggaggggaccgagggacgaggatgctgccgtgatggcgctgtagctgtgctgctgcgcgagcggcggcgaacgaaggatgcgggaggccgtggctttcgcgaccgagtcggtggaaaagctgctggtggtgatgcagcggcactgcgcctcggcca

SEQ ID NO: 5312 - DNA, 232 bp, Zea mays
  misc_feature: Incyte ID No: 700356242H1
  unsure 44-45: a, t, c, g, or other
ctttccttgctccgtctcgtcgttgtcttcccttttttttttcnncagccacctctctccctcgctagagcaaaaaccttgccacgaatcgccgacactccaacccggaagaggcaacgaggtgactccgcgcctcggtcatgggtgacagccaatactccttctcgcttaccactttcagcccgtcgggaaagcttgtgcagatagagcacgcgctcacggctgtcggatc

SEQ ID NO: 5313 - DNA, 67 bp, Zea mays
  misc_feature: Incyte ID No: 700356243H1
taatgccggatggctttgtaaagtttgggaggacatgcatcataattgaagtcaagtgataggatcc

SEQ ID NO: 5314 - DNA, 244 bp, Zea mays
  misc_feature: Incyte ID No: 700356244H1
  unsure 2: a, t, c, g, or other
cnagcaggcagagtctgcacctcctattccgaaaaaggctgctccttctaaggagccaaaggcaaaggatgtcaagaaggaggctccaaaggaggcccccaagccaaaggtggttgaggcaccagcagaagaggaagcaccaaagccaaagccaaagaatcctcttgacttgctgccaccaagcaagatggtccttgatgactggaagaggctatactcaaacacaaagactaacttccgggag

SEQ ID NO: 5315 - DNA, 207 bp, Zea mays
  misc_feature: Incyte ID No: 700356246H1
gccccaggatcctgggtgatttcacagctttcgccgacttctgcttcaagacgtacggcgaccgggtgaagaactggttcaccatcaacgagccgaggatgatggcccagcatggctacggcgacggcttcttcccccccgccagatgcaccggctgccagttcggcggcaactccgccaccgagccgtacatcgccggccaccacc

SEQ ID NO: 5316 - DNA, 118 bp, Zea mays
  misc_feature: Incyte ID No: 700356251H1
  unsure 2-3, 15, 31, 38, 49, 53, 80, 85: a, t, c, g, or other
cnncaagcatagagncaccaagcgtcaaacnttgccangcaggtagcanccancccaagaaagctagacaccataacccntgggntgcgcgctaggtacgtcttgcgtacattggctg

SEQ ID NO: 5317 - DNA, 308 bp, Zea mays
  misc_feature: Incyte ID No: 700356252H1
ctcttgatgagcttttagaaagcactccaactcacgtatttgcatcagtgtggtatgaatggcggcagacaaaatattaccatttgcactacagtgaactagtacgccttgctgccctttacaaatatggtggaatataccttgactctgatgttattattcttaaacctttaacatcgctccggaattctattggtgccacaaatcatgtctctggaaattcccgttttggtggggctgtgttagcatttgaaaaacagagccctttattggaggagtgccttagggaattttattcgacatatgat

SEQ ID NO: 5318 - DNA, 309 bp, Zea mays
  misc_feature: Incyte ID No: 700356254H1
  unsure 26, 227, 274, 296-298, 301, 304-306: a, t, c, g, or other
atcgccttcaggaaggcaggagaggnggccaagggagccgcattggccagcgacgccttctttccctttgcctggaatgatgccgtcgaggaggcgtgccagaacggcatcggcatcatcgcccagccaggaggcagtaagaaggacgaggacgccgtcgcgtgctgcaacaagtatggtgtgtcgctcgtcctcaccggcgtcaggcacttcaagcattagccgtnatgccccatggctggtccatcttagcttagggagttacggaaaaaanaacaagcttcgaaggtgcagtnnnggnagnnntta

SEQ ID NO: 5319 - DNA, 229 bp, Zea mays
  misc_feature: Incyte ID No: 700356259H1
  unsure 213, 223, 225: a, t, c, g, or other
gactcaccttttcaagttatctaggcatttcctatatatttaccacatataaaaattatactaaggcagtaacaaaagaggtgcctttatatctgacaaacagaagggagtgaaaaagtttagattacacctcagtttgcctgtggtgacaactatgtcaagtggcacttcgtccggatcgagccggtgggtccaaagttctagatccgaggntgacctagancnccgg

SEQ ID NO: 5320 - DNA, 216 bp, Zea mays
  misc_feature: Incyte ID No: 700356261H1
  unsure 81: a, t, c, g, or other
gaatataataaagcacgagcacgcatcttcaatggttctgtttctgcagattctgatgctgcaagtgttttgggaactctngcactggcagagatgagtcagtaaatgttgaaccttctgttgatgaaatcaaagtcagcacgatgaacaaccgttccagagttgctgttttcaaggatactcaaaaggatcgcagtgacccagattatgatcgaa

SEQ ID NO: 5321 - DNA, 310 bp, Zea mays
  misc_feature: Incyte ID No: 700356262H1
ctgatgccctcaagtcaaaggttgctgaggcgatggatgttctccacaatgtggcccatcagcaaaacgcaaacaccccgaccagtcagcttgctgcattatcactaaccgaaggcattatctcctaacttgaaagccataacaaactatcttcagtttgcaattgagtgatgtttccagaggttatctggcacatgacagtattgctcctttttttcttctatggttggacttgagtgctgttttcgtatttgcactctgcggtgtactgcgttaaggcaaatcagttgtttgcaagtttgagtgctat

SEQ ID NO: 5322 - DNA, 308 bp, Zea mays
  misc_feature: Incyte ID No: 700356263H1
  unsure 25, 28, 33, 46, 74, 77, 81, 99: a, t, c, g, or other
ctggcaccgccacagcgtcggcggncgntgatngcgcgagttcgantcctctggccgggctgacgcagtgcgtnacnaagncgcgggtccggggtcacntcctgcatgctggactgctaccagccgctggtcgacctggaccccgtggagctgcccgtctgcctcctcaagtgcaccaacgacgccatggtctgcgccaccggctgccccgtcaccgggaacgtctagctagcttgctatagctagcccatcattatatatatatacttactcatcttaatataaccccgccattattattaactagc

SEQ ID NO: 5323 - DNA, 127 bp, Zea mays
  misc_feature: Incyte ID No: 700356265H1
  unsure 124-125: a, t, c, g, or other
caaaaacgtgtgaggagggaagagggtgcagacctcagctcagctgcctgttgaacttgtctgggtcatctcggcacccccgctttgcctcgagccccctggccagcatgtcttccacacaacnnag

SEQ ID NO: 5324 - DNA, 140 bp, Zea mays
  misc_feature: Incyte ID No: 700356266H1
  unsure 2, 9, 27, 30, 58, 105: a, t, c, g, or other
cnctgagcncagcccagaatcagaggnganccgaaatgatcttgataatccggaagangctgtggctaccaaaagcaggcccgcaggattccggtcacgtagttncttctcgtacctgttcctctcccagcacctgcagt

SEQ ID NO: 5325 - DNA, 300 bp, Zea mays
  misc_feature: Incyte ID No: 700356268H1
  unsure 2, 256, 260-262, 264: a, t, c, g, or other
gntcgtggatttgaaactgccactgtagcagatgtcttgaagtctaaagggaagagtgctgatggatcttggctctggtgcaccacagaggatagcgtctatgacgctgtcaaatctatgactcagcacaacgtgggagctttggtggttgtcaaacctggacagaataaatcaatcgctggcattgtcactgagagagattatctccggaaaatcatagtgcagggaaggtcttccaagtcaactaaggttggcngacnnncngactgaagagaacaaactgatcacagtgaatcccga

SEQ ID NO: 5326 - DNA, 210 bp, Zea mays
  misc_feature: Incyte ID No: 700356270H1
  unsure 191, 205, 207: a, t, c, g, or other
cttgaggacttcaaatatgaggagaactccaaaaaagcagtacaatgcttgaacaatatggtgactgatgcactgattcatgctgaagagtgccttcagtacatgtcagcctgaaggatcatgccattttccgtttttgtgcaataccccagataatggcaattggaacatgtgctctttgctacaataangtgcatgttctttngnggg

SEQ ID NO: 5327 - DNA, 300 bp, Zea mays
  misc_feature: Incyte ID No: 700356271H1
  unsure 2, 70, 142, 144, 233, 261, 297, 300: a, t, c, g, or other
cnctcggtccctcctcgtcgttctcccgtgtccgccgtgcactgtctgtactctggtggcggcgactggncggcctccgccgctgccctacgccaggatcccaggctgcatcttccgtacgccaggagggcctcgccgcaantnggtgggaggcagagatgagccgggggcggtcgccggagccgctggatttcttcatctggactgtgcaggatgtagggttatggttgganggaaataaatcttggaagctaccgccangcttttgaagaaaatggtgtcaatggagatatctanaan

SEQ ID NO: 5328 - DNA, 124 bp, Zea mays
  misc_feature: Incyte ID No: 700356273H1
  unsure 115-116, 118, 120-123: a, t, c, g, or other
ctgacttccctaattccccccatccttaccaccctcgttaaccctaacaaaaaaaactcatacccccattatgtaaaatccattgtcgcatccacctttattatcagtctcttcnncncnnnnt

SEQ ID NO: 5329 - DNA, 189 bp, Zea mays
  misc_feature: Incyte ID No: 700356276H1
  unsure 10, 27, 78-79, 186-187: a, t, c, g, or other
cactataganagataatactgcaacanaaaagcctaattaagttttagattttgtttcatgacatagatcatacaatnngatgttccaggttggccatttttcatatataaaaaaggcacatgttaaattggccgcatacaaattgtaattgagggcacattttgattactgatagttctttcttnncc

SEQ ID NO: 5330 - DNA, 307 bp, Zea mays
  misc_feature: Incyte ID No: 700356278H1
  unsure 94, 298: a, t, c, g, or other
gtctcacgctcacggcgtgcggcgcttctactcccctcttcccggcgtgggcccgccgccatggcaacctacgcgccgccggccacgccctggncggagattccgctgtgcctggggctggatgttgtgacctggtccagacagagacagcattcccatgtcatgtcaccaaccatgcgtggacaagtgccaaggggcacagtggcattggcatccctgacggcgttcacctcgatacagagctggaggtcaacccgggaaggcgtcgtcaatccctgatggcatggttttacgtttnctgaatctg

SEQ ID NO: 5331 - DNA, 300 bp, Zea mays
  misc_feature: Incyte ID No: 700356279H1
  unsure 2, 60, 273: a, t, c, g, or other
cnagtcgtcaccttacgctgctatgcttgctgctcaagatgtcgcacagcgctgcaaggngcttggcattactgcactgcacattaagcttcgtgccaccggaggcaacaagaccaagacccctggacctggtgcccagtctgccctcagggcgcttgctcgttccgggatgaaaatcggacgcattgaggacgttaccccggtccccaggacagcactcgcagaaagggcggtaggaggggaaggaggctgtaggcgtctcttctgcgtgcnatttgctggctcttgtcgggtggccat

SEQ ID NO: 5332 - DNA, 269 bp, Zea mays
  misc_feature: Incyte ID No: 700356280H1
agcagccacctggggaagagcaggtagcaggaaatggcggcgttcctgaggtcaaaatgttcaccagttggacgtactttgatgggaagccttggaaatagtttgtttggggctgccaactcttctgttggggcaataacaaggccttctcattgcgatgctatcagtcagcaaatcagaacattcatccagatgaggactaacctgaaggtggtcgataactccggggccaagcgggtgatgtgcatccagtccctgagggggaagaa

SEQ ID NO: 5333 - DNA, 295 bp, Zea mays
  misc_feature: Incyte ID No: 700356282H1
  unsure 42, 44, 46, 64-82, 166-168: a, t, c, g, or other
agcaagcagcagcagccggctcctcctccgcctcccgcagcngncncaccccgtccgtcaccannnnnnnnnnnnnnnnnnntcgggatcgaaggtgtacacccttgaggaggtggccaagcacaacaccaaggacgactgctggctcgtcatcggcggcaaggtnnncatgtgaccaagtttctggaggaccaccctggaggtgatgatgtcctgctgtcttccactgccaaggatgctaccgatgatttcgaagatgtggggcacagcacaacgcccgtggcatgatggacga

SEQ ID NO: 5334 - DNA, 238 bp, Zea mays
  misc_feature: Incyte ID No: 700356283H1
  unsure 140-167: a, t, c, g, or other
ttcggaacaacatgtatgggaagagggtcctgtcgaaaacctgcctgaagagcaggaagccctgatcccaacaatcccatggccgtcctgatcgcgctcaagtgtagtacaaatcctgtaataaggtagtgttatctagnnnnnnnnnnnnnnnnnnnnnnnnnnnnagtaggtctggggtctggttggaggaggaatccacattttgggccatgtagaacgatcccatgctgttgtc

SEQ ID NO: 5335 - DNA, 294 bp, Zea mays
  misc_feature: Incyte ID No: 700356284H1
  unsure 94, 192, 236, 289: a, t, c, g, or other
aagatcatacaatactcatgtaattgatacagaggataactgttcagtgaagattgcaatgcccgagagtgggggtctttaaaacaggattttntttccttgacgataccacaggttggaggtggagaagatatatttgccacaatcagatggtcacaaaaattgctatatgacaacggacaattttctgtncgaagtaccatttcgtttcccgcactttgtgaacccttgccaanggttttcatgaaaaaggagaaaatacagttgattgtgaatagtggtgtgagtnaggag

SEQ ID NO: 5336 - DNA, 254 bp, Zea mays
  misc_feature: Incyte ID No: 700356285H1
cggcacacttcctttgcggctgttgctgtaatacctattcttggggataccactagccggtaccagatcaaagattctgatcttaggatagaacgtttccgatctggtggccctggtggtcagcatgccaacactacagagagtgccattcgaattgtgcacattccgactggtataagtgcaacatctcaaaatgaaagatcacagcacatgaacaaggcatcagcaatggcagtgctccaatctcgtctgaa

SEQ ID NO: 5337 - DNA, 292 bp, Zea mays
  misc_feature: Incyte ID No: 700356286H1
  unsure 273: a, t, c, g, or other
attgaagtgtgcttggttattgatttccattaaattgcagcatagcttgctcttcatctgaaagttttcgagggtagatgtttatcgtgcaccatggtcgttggtaatgacatagttgacatggttgggtgctaaaaggacgagaagggtttgaataaacggtccgatgaacattctacttgagcttaagcatctcaagctctttagcatgcccgcaagacctgtcatctgtaaaggccttctgatagtgatgccctattttgttgagagcantgtatctcctttctgctat

SEQ ID NO: 5338 - DNA, 298 bp, Zea mays
  misc_feature: Incyte ID No: 700356288H1
  unsure 31, 56, 89, 185-186, 280, 284: a, t, c, g, or other
tcctcgcctttccccacatctcatcttcgtntgtgttcttgcgcgtacgcgtaacncagccccgatccgaatcgtcctcctcgcgagcntcgccgatcccccactcccctcccctcgcttcaagatgcagatctttgtgaagaccctcaccggcaagactatcaccctcgaggtggagtcttctnnccaccattgacaatgtcaaggctaagatccaggacaaggagggcatccctcctgaccagcagcgccttatcttcgccggcaagcagttgagganggcngaaacttgctgata

SEQ ID NO: 5339 - DNA, 300 bp, Zea mays
  misc_feature: Incyte ID No: 700356289H1
  unsure 110: a, t, c, g, or other
ggctgggagcacgtcatctccaagagcagcgacgacgtctcctacaaggcctggtgcgacaagcccacggctggccctcctaaatatctgagtattacaacatacgaganatgctcggcagagcagctgagggacttctacatggataatgagtacagaatggagtgggataacactgtcaaaaaacatgagcagctgcagtatgacgagaacagtggggtggaggtagggcgaacaattaagaagtttccacttctaacaccaagagagtacatattggcatggcgagtctgggaagca

SEQ ID NO: 5340 - DNA, 194 bp, Zea mays
  misc_feature: Incyte ID No: 700356290H1
  unsure 90-113, 170: a, t, c, g, or other
agctgacgacaccaccgtgtggtcgacaaaataaaaaggagagagagagagatggctctgtcgtctcgccgtatggccgccgcaccattnnnnnnnnnnnnnnnnnnnnnnnncgtggcggcagagaggacgatgggcagggtggtggtggaagagacgctctgcttgtnccagagccatgccttcaaaggcgt

SEQ ID NO: 5341 - DNA, 80 bp, Zea mays
  misc_feature: Incyte ID No: 700356291H1
  unsure 13, 20, 34, 36, 52, 59, 71, 78-79: a, t, c, g, or other
gagacggagcgcnaccttcntcagcttctagaangnactagaaccctccctncagaacnttgaagaccagnccagagnng

SEQ ID NO: 5342 - DNA, 299 bp, Zea mays
  misc_feature: Incyte ID No: 700356294H1
  unsure 280: a, t, c, g, or other
ctctctcgtggagacgactgggccgccgtcgttgctgccctacgcggctacacccacgtcttcttcgggcccttagccgcgacgagcgccaccagggagtagaagaggttaaccttctggttggaaacgatgtacttcgaaggctatggcttccgtggaagtactttcgagcagacatatcgctgctatcctgcgtctttcatcgacaagccacaacttgaggccggtgacaaaattataatgccaccatcagctcttgacgtcttgcatctctgcatantgaataccctatgctattt

SEQ ID NO: 5343 - DNA, 130 bp, Zea mays
  misc_feature: Incyte ID No: 700356404H1
  unsure 5, 17, 19, 69, 79, 81, 85-87, 92, 112, 120, 123-124: a, t, c, g, or other
cgtangaggttctgaantnacacaccggctaatgcatgcatgggtgtacgcttttgtcttttgctcggngacgacgganangcannngcttnactggatctggaggattagngctcacanggnncgccat

SEQ ID NO: 5344 - DNA, 233 bp, Zea mays
  misc_feature: Incyte ID No: 700356407H1
  unsure 97-123, 201, 221: a, t, c, g, or other
caatgtactatcacaataagacgaagatgccaccaccaccttgctcttgcttctctgctgtctctgttcccttctcctccttcaaaaccataacaannnnnnnnnnnnnnnnnnnnnnnnnnnagcaactgtctgcggcagctccatcgtagccatccaggagaggaggtacgcggacgccaagacgtccatgagcgccgngtggatgcgcccgtcacctncgaggatgagtt

SEQ ID NO: 5345 - DNA, 211 bp, Zea mays
  misc_feature: Incyte ID No: 700356408H1
  unsure 9, 35, 43-44, 60-62, 75, 191: a, t, c, g, or other
tcgcttgtncccaccaggtgccatggacgccggcnacgacganncccccgttctcctcgnnncgcgccgcccgcncctcccgaggcaagaggataaccaagctgctcgaggacgaggtcgagcaggacgaggctttctggaaccaagaagccctcaaggatgaggagaacgatgacaactacgtggaaganccggatgctggtgacgaatt

SEQ ID NO: 5346 - DNA, 234 bp, Zea mays
  misc_feature: Incyte ID No: 700356411H1
  unsure 55, 86, 119, 123, 126, 138, 141-142: a, t, c, g, or other
ggtggtgatcatggaggtcacgtggttccaggtggacctggactatgagttcgangcgcccaggtggttgcgaccttgcccaagangaggcgccgctggatgccgctgcggcgcaagantggntcncctccgcccccngcnntcccgccctctcccttaattgctaagatgttagctgaggatcttgggttacaaaccattagaagcattgcagatacagatgatctgcattgt

SEQ ID NO: 5347 - DNA, 244 bp, Zea mays
  misc_feature: Incyte ID No: 700356414H1
  unsure 211: a, t, c, g, or other
cacaaagactgttccaccttgttgagaccagtggatgcagaagattcattgagactgcataatatgtttcttcctttactttctggagttcacttttcactggcatgcttcaaattggggtcaagtactcacaagagacaattcgtactgatgcattatccataatgattctcattgtaaggacaacagatcccatagaagaacgccaganattcggatttacttcagtaatgacgagatgcat

SEQ ID NO: 5348 - DNA, 213 bp, Zea mays
  misc_feature: Incyte ID No: 700356415H1
  unsure 120, 155-156: a, t, c, g, or other
ggggacgccttcttcggcgcactgggaggccaggacgacgccaccgccgaggaggacgagcaggagatgcgggaggcgttcaaggtcttcgacgtcgatggcgacggcttcatctccgcngctgagctgcaggaggtgctcaagaagctcgggcnnccccgaggccagcagcatggccaacgtccgggagatgatctgcaacgtcgaccgcga

SEQ ID NO: 5349 - DNA, 256 bp, Zea mays
  misc_feature: Incyte ID No: 700356416H1
  unsure 11, 16-17, 152: a, t, c, g, or other
gcagcgcgaanaggannatccaatggcggcggcggaggggcagtgggtgctcatggcaacggggcggacgccgactaacattgcggtgatcaagtactgggggaagcgggacgaggcgctcatcctccccatcaacgacagcatcagcgtanccgctcgaccctgaccatctctccgccaccaccactgtcgccgtcagcccctcattcccttccgaccgcatgtggctcaatggcaaggagatctcgctattagg

SEQ ID NO: 5350 - DNA, 245 bp, Zea mays
  misc_feature: Incyte ID No: 700356422H1
  unsure 2, 95, 100, 124, 127, 130, 151, 177, 235, 240: a, t, c, g, or other
gncctctggtcacctcgcttccgctcccggctcccctccggccacccagacatcgtccgttcgctacgccaagagacaggaccggagaccatggnggacnagttcaccgacgaccagattcgcnganttnaaggaggtcttcagcctcttngacaaggacggcgacggttgcatcanaaccaaggagctcggaactgtcatgcgatcatgggtgagaacccaaccgaggctgagntccangacat

SEQ ID NO: 5351 - DNA, 229 bp, Zea mays
  misc_feature: Incyte ID No: 700356427H1
  unsure 41: a, t, c, g, or other
gtaatggctcttcaggttgagagtgaatttcaaaaggcttncgacaatggattgccaaagtcaaagttttgggagcctacttatgaagactgcttaaatttgattgctcggcttccaccagtggcttcttatgtttaccggagaattttcaagagtgggaaatcaatagaagccgataattctttggactatgcggcaaatttctcacacatgcttggttttgacgacc

SEQ ID NO: 5352 - DNA, 251 bp, Zea mays
  misc_feature: Incyte ID No: 700356431H1
  unsure 148-151: a, t, c, g, or other
cgaaatgctagttttcagaaactaagtgacagattcaagtacagtacagaaactattcacaggcatatcaaagcatgctttgatgcagtcacaccaatgactggtgaattcgtcaggccaccttcaattcaagctcaccggaaaatannnntctgatacacgttatgggcctactttgagaactgtattggagcaattgatggcatccatgtccctatgacaatatcggacagtgaagcagctccataccg

SEQ ID NO: 5353 - DNA, 146 bp, Zea mays
  misc_feature: Incyte ID No: 700356433H1
  unsure 103: a, t, c, g, or other
ctttgggatccccagaggtggaacagccccactttagagtctattatactccattcaggtggcagaggtggcttgcaggagtcaagattcatcgagaagcttnttcgaggacgagacttcagatggaaggcctcgcagacaactgc

SEQ ID NO: 5354 - DNA, 234 bp, Zea mays
  misc_feature: Incyte ID No: 700356435H1
  unsure 2, 161: a, t, c, g, or other
gnaccttcggcgcccgttcaggatccacatcttcccgagcgagttcttggttgacctcttcctcttcggaccacctccaaggctcttggtgtagcttgccactctcaccaatcaagttttcatgtctgatctcgacattcagatcccaactgccttcgatnccttcgctgaggccaatgctggggactctggtgcggcacagggtcaaaggatacgtacacgtgcgcatccagc

SEQ ID NO: 5355 - DNA, 160 bp, Zea mays
  misc_feature: Incyte ID No: 700356436H1
  unsure 22, 40, 43, 86-87, 108: a, t, c, g, or other
gggcgctcaaagacttggaggnaaagcaaaacagcaaganggnatcgatattcaagttgcagcagaggatgcaggctgtacaagcnnaggcttagacaactgtttgtnggttgcaactagtccaaggccatgcttcatttcatcccaattccctccaggg

SEQ ID NO: 5356 - DNA, 228 bp, Zea mays
  misc_feature: Incyte ID No: 700356440H1
  unsure 16: a, t, c, g, or other
accaaaaaggagaggnggggagccccggacggagaagagaacagaagaaaccccgcggccaccccttcctgcctatatttctctctctgtcttgcgcgacagggagagaccagcgccaacacctccggtttcttgattgggtggtgatcggtgaaggaaggagaaattaagatgagcctcttcgggcttgggagcaagaatcagaagacgttcaggcctaagaagaat

SEQ ID NO: 5357 - DNA, 239 bp, Zea mays
  misc_feature: Incyte ID No: 700356441H1
  unsure 2: a, t, c, g, or other
cncccggcccccgcgaacaacttcctgcttgcacgcaagccactccgaggccaagtctagggtttgggaatctgtaggaggggagaggggagcgcgctcagggtcagggaggcgaagatgatcgaggtggtgctgaacgaccgcctggggaagaaggtgcgggtgaagtgcaacaggacgacaccatcggcgacctcaagaagctggtggcggcgcagacggggacgcgccccgagaag

SEQ ID NO: 5358 - DNA, 254 bp, Zea mays
  misc_feature: Incyte ID No: 700356443H1
  unsure 2, 42, 165, 187, 189-190, 206, 234: a, t, c, g, or other
gngccgcgccgcgccgcgccgcgtttgcgttcgtccagaatnccaaacagtacggtacatcacctacctcccttgacctctacgtctccgaagaagagattctgccgagacaagatgatggagaagcagagcagggagcaccaggaaggctggcggcggcagaancagcaccaggaggagagatgtngnnatggtgatgcacagcnaggtgatgcggatccaagcaaggaggangacgagcgggccaaggtgca

SEQ ID NO: 5359 - DNA, 234 bp, Zea mays
  misc_feature: Incyte ID No: 700356444H1
  unsure 109, 138, 155: a, t, c, g, or other
atcctattggccacggcaactgccatcgccatggccgggaggcgtccggcaccggcggccctcctcctcctcgccgtagccttcgctcccatctcctccgccgttcgcncagtctccgatgcgcacagatccgctgcngaggagctcttcgctcnctccgccgacggttccttcggcgatttggagagtacgtatgaggcagtgaaaacgttccagatactcgggctggagaaa

SEQ ID NO: 5360 - DNA, 228 bp, Zea mays
  misc_feature: Incyte ID No: 700356446H1
gtgttttccaccctggataggggtcgtggatttctaagtcttgaggaggtgtaccaggcattaatcaaacttggtttctcgttggattcaccagccttctatactgtttgtgagagctttgacaagagcaagaagggcatgattcaattggatgagtttatatcactctgcatttttgttcagtcagctcgtaacctgttcaattcgttcgatacaagcaagcaaggg

SEQ ID NO: 5361 - DNA, 232 bp, Zea mays
  misc_feature: Incyte ID No: 700356452H1
  unsure 100: a, t, c, g, or other
tgatgaagtacttccacccaaactgtcatataattatacttttggtgaaacaacatacactctctataccaacagctttttaaactttggtcaaaatgcngctcaagactcattccatgaaatgctgaggtcaagaggctctttcaaaaatggtacacttgctgatcctgtgctcccagaggatattcacgcaatgaaggtgcttcaaggtcaacattagagaaccagtatg

SEQ ID NO: 5362 - DNA, 149 bp, Zea mays
  misc_feature: Incyte ID No: 700356456H1
  unsure 24, 26, 32, 35, 133: a, t, c, g, or other
catctgcgactacgtcggctcccngnacgccnggnataagctagacctggacaaggtgttcttcgttaccaaacagtgcggcgtcaccgtccccaagggctgcggatcaaagcaggactgaagagcggctgantctgaatggagcaatt

SEQ ID NO: 5363 - DNA, 227 bp, Zea mays
  misc_feature: Incyte ID No: 700356460H1
  unsure 195, 206: a, t, c, g, or other
atcagtatttgttccgcatcatcagtatgatgccttggaccggaaaacaggtacccgtaacttagctcaaccaccatatcagcaccaagatttgttgctaccaagccaacaaaatcaaggtacaattttgggaaaccaagttcatcctcatctgccccaacagttacatccccattcccatcctcaccatcaggngacttttagangctttgcccctggcatgactg

SEQ ID NO: 5364 - DNA, 240 bp, Zea mays
  misc_feature: Incyte ID No: 700356461H1
  unsure 2, 79: a, t, c, g, or other
gnataattgggaataaatagttcgtgaatccctgaagcgtgcatatatatattcctgccaagataaaggtaatggagtncgtcacgcaggttccagccggccgtcatcctgcttctcctgctcattgtgtccaccgatatggcacaggcaagggaatgcgagaagtacagtgagcgatttgttggggcatgcatgatcgcagacaactgcgccaatgtgtgccgcggtgagggcttcttg

SEQ ID NO: 5365 - DNA, 126 bp, Zea mays
  misc_feature: Incyte ID No: 700356463H1
  unsure 57, 104, 118: a, t, c, g, or other
cagctggacatcgacaacccgcagagcatccgcgcgctgcgtgactttctgcttcancagtacggaggactgaacgtgctggtcaacaatgcgggcatcgcctntcaaagttgttgancccacccc

SEQ ID NO: 5366 - DNA, 127 bp, Zea mays
  misc_feature: Incyte ID No: 700356466H1
  unsure 2, 86, 104, 116, 126: a, t, c, g, or other
gnacggtggcgacgacttctcctttacgctcaaggagggtccgactggcacctggatcgctgacaccaagaccccgctcaagtacnccctctgcatccgcttcnctgtcaagtacnggtggatacng

SEQ ID NO: 5367 - DNA, 230 bp, Zea mays
  misc_feature: Incyte ID No: 700356468H1
  unsure 2: a, t, c, g, or other
gnagctcccctgcctcatgcccatcaaatcgttaaacttgttagatcggtaggcagagagaggccagactgatgggaatggcagcgaaggagcactttgtgcttgttcatggtgaagggcatggagcctggtgctggttcaagctccgctggctcctgagggcgctggctatcatgttacatgcatcgacctagccggaggggccggcgatcctactgaccccaacacaa

SEQ ID NO: 5368 - DNA, 144 bp, Zea mays
  misc_feature: Incyte ID No: 700356471H1
  unsure 17, 136: a, t, c, g, or other
ggtcgtggtattagcantgggggtggtcagagttccttgggctatctctttggcagtgacgaagctccaaaatcatttgagaagcctgcaccagttcaaaagccaactcctccatcctctgcagagagactaaaanatccccgc

SEQ ID NO: 5369 - DNA, 184 bp, Zea mays
  misc_feature: Incyte ID No: 700356472H1
  unsure 2, 62: a, t, c, g, or other
gngccacctccctacaaaacactggttaatgtttatggtggccccagtgtccagcttgttantgattcatggatgtgtacagttgacatgagagctcaatatctacggagcaagggtatattagtttggaagatggataatcgaggatcggcaaggcgagggctgcattttgagggacaactga

SEQ ID NO: 5370 - DNA, 219 bp, Zea mays
  misc_feature: Incyte ID No: 700356473H1
  unsure 51: a, t, c, g, or other
actttgcaaggatgcttcttgagaatagccctcaagaggctcaagcaaggnaggctcgacaggtgctgcaagcttgtcaggataaggatgattctcaccaactgaactatgactttagaaatccatttattgtttgcggtgctacatatgttccaatctaccgtggccaaaaggatatttcttgcccatactgtggatcccggtttgctcctccatcga

SEQ ID NO: 5371 - DNA, 216 bp, Zea mays
  misc_feature: Incyte ID No: 700356474H1
  unsure 4, 103: a, t, c, g, or other
agangtcgcctaattctttcgatcgaattaggcgccttcttcgtcccacgctccgtctttatttgtaatctgaagcttacaggaacatttgagtggatcatanacggattggtaggcctcttgaaagtccgggtggtgaggggcatcaaccttgcctaccgcgacgcaagaggcagcgatccgtatgtcgtcctacgacttggcaagaagaaactt

SEQ ID NO: 5372 - DNA, 64 bp, Zea mays
  misc_feature: Incyte ID No: 700356477H1
  unsure 2: a, t, c, g, or other
gnaatcgaaaggtgtgttgatttgatttagtttttttaattaccgtgccccgtggtaattaatt

SEQ ID NO: 5373 - DNA, 203 bp, Zea mays
  misc_feature: Incyte ID No: 700356478H1
  unsure 44, 153: a, t, c, g, or other
tacggacgacaactatccctaatcgccagttcgccaccagcctncgcctctcccctcccactcggccactcccagtgccagccgccgtgcgctcgctcgcgcgcgctctctttctgggacgaccagtgggatatctccaccgccgccttacgncaggtgcggaccttcgccgatctcttcgccagcgaagagcgtccatcagt

SEQ ID NO: 5374 - DNA, 245 bp, Zea mays
  misc_feature: Incyte ID No: 700356480H1
  unsure 3, 20-21: a, t, c, g, or other
ttntcggtataaagttattnngattgagtgactacagggtacaattcgtggtttacttcgcctacataaacttgcaagtttcatttgcttttcttatggcaacattcttttcaaattgcagaactgctagtgtgactggatatctcttcacaattggttctgcctattcaggagaatatttattcaggcctatttttgaagatatgtccctctcaagaagctggagtacactcatggagttgttt

SEQ ID NO: 5375 - DNA, 169 bp, Zea mays
  misc_feature: Incyte ID No: 700356482H1
  unsure 40, 90, 92, 95: a, t, c, g, or other
gccaattgttgctgttcctgcattcctctgtgccgatgcnttccagaaggtgcttcccttttgtactggtttcgcagcagggtgcatgananggnttgttatagcggaggttcttcctgacgctttaaggaagcaactccatctcaagtagcttctgctggaacactcg

SEQ ID NO: 5376 - DNA, 180 bp, Zea mays
  misc_feature: Incyte ID No: 700356483H1
  unsure 12, 16, 18-20, 47, 54-55, 57, 84, 122, 151, 165-166: a, t, c, g, or other
tctccttccggnttcngnnnccgctcctccccaaattcccccaaaanctgacgnncntggagggccgatccgcggctccccgcngcctgatccgagcagtctcctcggcccagccggggatncaagcgggatggggtacttgagctccgtnatcggccaccccanngatggatcctccgt

SEQ ID NO: 5377 - DNA, 127 bp, Zea mays
  misc_feature: Incyte ID No: 700356484H1
  unsure 23, 47, 72, 86, 90, 92-93, 96-97, 104, 106, 118-119, 123: a, t, c, g, or other
acactgccactcatcacattggnaccccttccgacacgggccggganttcttcggactgcaggcagccaggncacgcaccagcganaccncnnatnnggccggncnacgcaccggggnnccantcga

SEQ ID NO: 5378 - DNA, 221 bp, Zea mays
  misc_feature: Incyte ID No: 700356486H1
  unsure 2: a, t, c, g, or other
gntggtccagcatcacctgttgctgatttggtggttgccacagctgattttcagaaggatctggctagctggaatatctgcaatataaaagcaggtgttgatgcaaaagagctgttccatttgtacattgtattgtggattgaagacaaacgcaggatgttactggaaaactgcagactggacaaggtcaaatggtcaggattaggacccagcatacgact

SEQ ID NO: 5379 - DNA, 225 bp, Zea mays
  misc_feature: Incyte ID No: 700356494H1
  unsure 70: a, t, c, g, or other
cagatccaagaagagggaagagcaccaaggaccttcggcgcccgttcaggatccacatcttcccgagcgngttcttggttgacctcttcccccttcggaccacctccaaggctcttggtgtagcttgccactctcaccaatcaagttttcatgtctgatctcgacattcagatcccaactgccttcgatcccttcgctgaggccaatgctggggactcggtgcgg

SEQ ID NO: 5380 - DNA, 168 bp, Zea mays
  misc_feature: Incyte ID No: 700356505H1
  unsure 2, 131, 157, 161, 164: a, t, c, g, or other
anttcctgatattcaactctccagcaagctcccacctcttttggtggtcaatgtacaggtgccattgtatccagcttcattatttcagaatgagactgatggggaagggatgagtttgttttgtactttangctttctgatggttacttcgaaagancttncancttc

SEQ ID NO: 5381 - DNA, 299 bp, Zea mays
  misc_feature: Incyte ID No: 700356510H1
  unsure 31, 95, 102, 114, 155-156, 160, 173-174, 179, 190, 200, 204, 206, 209,: a, t, c, g, or other
gtgacttccttgtcggacaactcaacttcanaggcccttgcaaggtgcgacgtgaccatccaggtggatgggcaatctggctggcgagcaacggntctaagncagtacaaggancatggtaattggatcgagattctacgcgtggataacctggnnatcnccggtaagggaannctgangggccagggcncagccgtgtngagnangantcntgcaccaataagtacgactgcaagatnctcccaactcgctggtgatggattcgtgancaaggggagtgtccgggtcacgctgctcaa

SEQ ID NO: 5382 - DNA, 155 bp, Zea mays
  misc_feature: Incyte ID No: 700356514H1
  unsure 95-96, 134: a, t, c, g, or other
gtcagaagaagacgaagacgaagagaaagagaaaaagcccaagaccaagacaataaaggagactacttctgagtgggaattctgaatgtgtgaannctgtatggcttcgcagcccaaaggaggttactgatgangaatactcgaagttttaccac

SEQ ID NO: 5383 - DNA, 217 bp, Zea mays
  misc_feature: Incyte ID No: 700356516H1
  unsure 23-24, 28-29, 51, 99, 114-115, 124, 133, 169, 202, 207: a, t, c, g, or other
gcggcttcggaggcggcagcggnngcgnnaacaccggtgacgccgacagangggacggtgatcgcgatccacagcctggaggagtggagcatccagatncgaggaggccaacanngccaagaanctggtggtnattgacttcactggcaatatggtgtcctcctgccgngccatggctccaatttttgctgatatggccaanaagtncccaaatgtt

SEQ ID NO: 5384 - DNA, 275 bp, Zea mays
  misc_feature: Incyte ID No: 700356517H1
  unsure 13, 96, 98-99, 110, 124, 130, 136, 145, 168, 194, 208, 212, 221, 246,: a, t, c, g, or other
acaaaaagatagnggtctaccatagagggcacatgttccctaattggcctagagcatagggggctcattatccttccacctctggtggcgggcggnanncgctgctctgngaagccagcctcangcaatntccgcnactttaggngttaggatgcaaaggcattcgcnaaggcacccgaaacccactacacaanttggaatgggtgcnccanagtttgtancactagacccaagcacatgcaccanaattganatccaaacttccttattgcccc

SEQ ID NO: 5385 - DNA, 296 bp, Zea mays
  misc_feature: Incyte ID No: 700356519H1
  unsure 68, 240, 291, 295: a, t, c, g, or other
cgacgcgcaagccagtgccgcacccagaccagatctccgcgacatatcagtccgttcgtccagctaantgcactgcactgcactgcacgcaatggccaccacggcgaccgaggcggccaaggttgcatcggcgcaggagcagcaggccaacggcaacggcaacggcgagcagaagacgcgccactccgaggtcggccacaagagctgctcaagagcgacgacctgtaccagtaacatcgnggaacacgagcgtgtacccgcgggagccggagagctggaaggacttccgcnagant

SEQ ID NO: 5386 - DNA, 171 bp, Zea mays
  misc_feature: Incyte ID No: 700356520H1
  unsure 33, 146, 164-165: a, t, c, g, or other
caccatccaatccaatcggcttccccctaagcncccatggcgacggcggtggaggttcccgtggaggcgccggtgaggacagtgaaggtcaccaatgtctctcttagtgcaactgtgcaagacattaaggagttcttttccttttnaggagatattgatcatgnngagatg

SEQ ID NO: 5387 - DNA, 195 bp, Zea mays
  misc_feature: Incyte ID No: 700356525H1
  unsure 4, 25, 71: a, t, c, g, or other
tggngtcactgaaggggcaccaccngagctcacgtccccaaatccagcccaatgaacctctgtttctgttnctctctttggcgccttaatcattttctgttggacagtgctggatcgttgatcggggtactgttccatgacactggtggtttatgtttacttttcctccccaataatcttggatcgagcgatgtt

SEQ ID NO: 5388 - DNA, 300 bp, Zea mays
  misc_feature: Incyte ID No: 700356526H1
  unsure 24, 30, 47, 56, 78, 101, 120, 155-156, 185, 189, 216: a, t, c, g, or other
ccgctctcttatctttcctcacanagaagntggggtcagaggaaganatggatgtngatgaagaagatgtgcaagaantggcgtgatcaaattagcaagantcactcttcatctgaaganacattggatgactttatggatgcagaaagtggagnngcaaagcactccttgttctgtgggaagangtgnagatgatcaagtaatcatagatgattngaaggtccacaacaggaagagcaaaaagaagtatctaacaatacaaatgctaatgaagacctcggttctgacagaaaatctaat

SEQ ID NO: 5389 - DNA, 235 bp, Zea mays
  misc_feature: Incyte ID No: 700356527H1
  unsure 11, 130, 133, 154-177, 197, 220, 224: a, t, c, g, or other
gacctccagcngcaacgatgcccgcgacggcgccatgggcagcgtgcaggacgagccgcggcagcagcgccacgatgactatcaccccgagatcgtccccgagaagatcatacacgaggacgcgttgccngtncgttgctgcagagaaggagannnnnnnnnnnnnnnnnnnnnnnnaaggaggaggaggtggatcncacaagaaagagctgctctgtcnccgntgccgagacta

SEQ ID NO: 5390 - DNA, 130 bp, Zea mays
  misc_feature: Incyte ID No: 700356529H1
  unsure 35, 51, 53: a, t, c, g, or other
gtgaaggaagcgggggtgcggaggagggcgtgganatcacttacgtgagcnanggcggggagcagcatctgccgctggtgatgtcgctggtggacgaggagctcaacgagccctattccatcttcaccta

SEQ ID NO: 5391 - DNA, 288 bp, Zea mays
  misc_feature: Incyte ID No: 700356533H1
  unsure 117, 122-124: a, t, c, g, or other
gtgcaggaaacactgttcaagtaatttttgacagtggaagctcctatacgtacctcccaaatgaaatatatgaaaaccttgttgcagcaatcaaatatgcgtcacccggctttgtcnaagannntcagatcggacattacctttatgctggaaagctgatttccctgtgaggtatctggaagatgtcaaacagttcttcgagcccttgaactttcactttcgggaagaaatggctttcatgtctaaaacattcactatttctcctgaggattacttgattattagtga

SEQ ID NO: 5392 - DNA, 291 bp, Zea mays
  misc_feature: Incyte ID No: 700356534H1
  unsure 151, 227: a, t, c, g, or other
atccggagcagccgcagtcccaccgaccccgccgccggtcgccctccatctcctcgccgctgcctctcgtttctcttttcaataatctcgatgagccgtggtggtagtgccggtggtggtcaaagttctctgggttatctctttggaagcngtgagccccccaaaccagcagtggcaccagctgcaagtgctccacctgttgagaaaccatctgctgcaaagactgntgcggccaagcaggttgctgctggggttaccagccaaaccaataactaccacagggctgatggt

SEQ ID NO: 5393 - DNA, 228 bp, Zea mays
  misc_feature: Incyte ID No: 700356535H1
  unsure 2, 94, 148, 202: a, t, c, g, or other
anaatatccatcttgacgatgcaagctgacgggggttgggatactgcaaccattgagcgagcacatcctgtcggtgcgactgccatatcctggnccccctgcaacagcgtcactagctggtgcaggggagcttgtttacaagcttgtnctcaggagggtttgactctgttgttaaggtcggggattcaaaaatggtagttgnaagctggagagtgctcttaacctctg

SEQ ID NO: 5394 - DNA, 113 bp, Zea mays
  misc_feature: Incyte ID No: 700356537H1
  unsure 49, 82, 112: a, t, c, g, or other
cgatccccgcaaggttcgcaaacatgtctaccgtgctccagcgcccganccccggcacggtacagtgcttcggccgcaagangacggctgtggccgtcgcctacaccaagcng

SEQ ID NO: 5395 - DNA, 252 bp, Zea mays
  misc_feature: Incyte ID No: 700356541H1
  unsure 2, 60, 110, 200, 203, 212, 215, 241, 243: a, t, c, g, or other
ancggggatccgaggggtggggtggaggggaccgagggacgaacgatgctgccgtgatgncgctgtagctgtgctgctgcgcgagcggcggcgaacgaaggatgcgggangccgtggctttcgcgaccgagtcggtggaaaagctgctggtggtgatgcagcggcactgcgcctcggccacttcgtggatggccggaganctnatgcgagcngtncgatggagcatgagaagaacggcatngncgccgctta

SEQ ID NO: 5396 - DNA, 298 bp, Zea mays
  misc_feature: Incyte ID No: 700356542H1
  unsure 168, 184: a, t, c, g, or other
caagtcccccaacggcgaacgcgtcatcgctggtgccatcgttgcccagtcgggctgctggagcatgctcaagggaggcatgaccgcttactcttcgggacccgcagagatctactttgagagccacgcaccagttgacatctgggtggacagtgtctcgctgcagcncttcaccttcgacgantgggacggtcacacccgccgctccgccgacaaggtccgccggcgaaccgtgaaggtggtcgccatgggcgccaacgacaagccgatggcgcatgccaacgtgagcatcgagctc

SEQ ID NO: 5397 - DNA, 300 bp, Zea mays
  misc_feature: Incyte ID No: 700356543H1
  unsure 2, 105: a, t, c, g, or other
cnctgaatggtttaagcttcagatgtgcaaggaccgttttgagcacttattgaagattgattctctaaaagaggttgatccatcattggggagtcaccgtaagtnccaaggtccttacagatgaatgtgcaaatggatcatctcaaatgacaacatgttcaagtggcaaggtgccagatgaaggtagtagccctcaagtctcatcagaagttgcctgtgcatgaaaatgctatactgaaggttatggaattcctgcgttgccaagggcggacgccatccaactcctcatgcagtacaatg

SEQ ID NO: 5398 - DNA, 146 bp, Zea mays
  misc_feature: Incyte ID No: 700356544H1
  unsure 28-29, 61, 78, 84, 95, 99, 138, 141: a, t, c, g, or other
ttctatgagaacaaagaaaacctttccnnattatgggatattctagccgtgtatgcatggnttgacaaagatgttggntactgncaaggaatgantganttgtgctcaccaatgatagttctactaaaacgatgaagnagntgctt

SEQ ID NO: 5399 - DNA, 130 bp, Zea mays
  misc_feature: Incyte ID No: 700356551H1
  unsure 2, 6, 14, 80, 114, 116, 118, 121: a, t, c, g, or other
cntgangagctttnagaaagcactccaactcacgtatttgcatcagtgtggtatgaatgggcggcagacaaaatattacnatttgcactacagtgcactagtacgcctgctgcncngnggnaggcatggt

SEQ ID NO: 5400 - DNA, 136 bp, Zea mays
  misc_feature: Incyte ID No: 700356555H1
  unsure 22, 32, 52, 67, 76, 97: a, t, c, g, or other
ggacatggatgacacccaaggnagttatcganaaggcagttgatttcaaganacctgtatatgaggnagcattganacactttgccccctacctgcngtccagatccagccgcttcatcatagacgatttggccat

SEQ ID NO: 5401 - DNA, 120 bp, Zea mays
  misc_feature: Incyte ID No: 700356556H1
  unsure 18, 28, 46, 65, 67, 76, 79, 81, 85, 92, 100, 107: a, t, c, g, or other
ttaatttggaggattgtnatcttgaggntaatttagacgatgaagntgctccaagaagttcgaangnttccagaanggnanaganggtaganaccggaanagattcnagccttatgttca

SEQ ID NO: 5402 - DNA, 198 bp, Zea mays
  misc_feature: Incyte ID No: 700356562H1
  unsure 90, 117, 122, 134, 140, 154, 179, 184: a, t, c, g, or other
ctggcaccgccacagcggcggcggccgagatggccgccggtcgaatcctctggtacgggctgacgcagtgcgtgacaagctgcgggtacnaggtcacctcctgcatgctggactganaccanccgctggtaganctggancccgtggagctgcncgtctgcttcctcaagtgcacgaanatgcnatggtctgcgccaa

SEQ ID NO: 5403 - DNA, 231 bp, Zea mays
  misc_feature: Incyte ID No: 700356563H1
  unsure 21, 24, 41-42, 77, 148, 206, 213, 217, 221: a, t, c, g, or other
tttttggaatatattctaganganattagtggtcaaaggtnnacattgaaaccgtggaaaggcaaatgtggcaaacnatttttcaccagagggagtaaatccttagttttgatcactctaaccatgcagtacatatactatctcttcntctgctgatgattccaaatgatttacacaatgttctaattcccaaacatacatgccangttctanttcncaancatacgggga

SEQ ID NO: 5404 - DNA, 266 bp, Zea mays
  misc_feature: Incyte ID No: 700356565H1
  unsure 41, 258: a, t, c, g, or other
caaggtcgacggcaaggagaggtacgccttcaacggcgtgnccgcacgtggacccggaaaaccccgtcaagctcgccgagtacttcaacgccagcgacggcgtgttcaagtacaacctcatcggggacgtgccgccctccaacacggcccccaccaagatggcacccaacgttcatcagcgccgagttccgcacgttcattgaggtggtcttcgagaaccccgagaagagcatcgacaccatccacatcgagggttangcttcttc

SEQ ID NO: 5405 - DNA, 245 bp, Zea mays
  misc_feature: Incyte ID No: 700356571H1
  unsure 28, 45, 92, 111, 116, 128, 131, 134-135, 141, 155, 166, 169, 186, 202,: a, t, c, g, or other
cacaagctatagctagctatagcttgcngcaccatggcagcaggnaggatgctcctcggcgtctgtgccgtcctgatggtggtcaccgtcantaacacggcggagggccangtggngtcggtctcgtnggntgnngaggtncgccgacagcacgnggaagaacatnaangctgaggccggtttcangggtcttcaggtggcnatcaagtgcaagaacancaacggcgantacgagcaaaagccgt

SEQ ID NO: 5406 - DNA, 292 bp, Zea mays
  misc_feature: Incyte ID No: 700356572H1
  unsure 2, 78, 88, 131, 139, 163, 184, 223, 257: a, t, c, g, or other
gncaggtagtattaccttgtttgaagtcactgcagatacagtggtgtcctaaactgaaagctctaccagaaggcctgnagcatgtagngctgtgtgaacttcatgtggagggtgcacatagcctaactganatcaaggncctgccagaactatctgacgagcnccatctcaaagataataaggngctacagaggatctccaacctgcccatgcttcgttcccncattatcgatgactgctccaaagttgaagcagtngcaggtcttgatgcgctgcagcacctcagacttgt

SEQ ID NO: 5407 - DNA, 141 bp, Zea mays
  misc_feature: Incyte ID No: 700356576H1
  unsure 109: a, t, c, g, or other
gactacccggccgtcgttctgcgcgtcttcacagcttacctcgatctcatgcgcacgctgcaggacacgtaccagctggagcctgcaggctcccatggcgtgtgggganttgatgattaccatttctgcgttcaatttggg

SEQ ID NO: 5408 - DNA, 139 bp, Zea mays
  misc_feature: Incyte ID No: 700356578H1
  unsure 18-19, 123: a, t, c, g, or other
taaagggtgtcataagtnnattcgttctcattgtgctatggtggcatggatattggtggcggtgctatggtactcggtggaatgcttgctccctcccagacatgatttttttcaaactcggancctctccgcagcccat

SEQ ID NO: 5409 - DNA, 173 bp, Zea mays
  misc_feature: Incyte ID No: 700356582H1
  unsure 2, 16, 18, 38, 84, 97, 115, 117, 170: a, t, c, g, or other
gngccacgtcgccganangctcgaggtcgacctcgagnagctctaccagcggattggctggccgctctaccgcaagtacggtcncgccttcgaggcnttcaagctcatcgttgcngnccctgacgctatcctcgacgtactcacctatgaggaaaaggaggtcggcccanatg

SEQ ID NO: 5410 - DNA, 284 bp, Zea mays
  misc_feature: Incyte ID No: 700356585H1
  unsure 148, 204, 210-211, 244, 266, 280: a, t, c, g, or other
aggactcgtaatttgattgtgaggctgcgccataatgtcattcgaactggactgcgcaacatcagcatttcttactcaaggatctcccttgctgacattgctaagaagctaagactagactctgagaaccctattgctgatgcggagntcattgtagccaaggccataagagatggcgccattgacgccaccatagattcttgnaatggnnggatggtatccaaggaaactggtgatgtctacncaacaaatgagccacaattgcnttcaactcccaggnttgg

SEQ ID NO: 5411 - DNA, 288 bp, Zea mays
  misc_feature: Incyte ID No: 700356591H1
  unsure 179: a, t, c, g, or other
ctctcaccaatctgtgtcctgtgcttgtgagcgttttagagttccaacaattggtatcagaggcagtttatgcccaagatcttacgctactacctcgagtccgagtccatggcgatggttccgcacggcgccggggggagttcggtctccatgtcatacccggtgctgtcgccggcganctacacggcgtgggcaatcaaggtggagtcgatcctcgacgcgcaagtctctgggaggccgtgtctccaccagataatggcgagtgaacgcggtgaagaacaagacggc

SEQ ID NO: 5412 - DNA, 120 bp, Zea mays
  misc_feature: Incyte ID No: 700356592H1
  unsure 2, 84: a, t, c, g, or other
gnttgtttgttggtggagatcaaagggacggggacaaggggagagtgaggtatcaggtttcccataaactgggatttcaccccntacctgggaagacgcccaaggggaaatgtggattac

SEQ ID NO: 5413 - DNA, 119 bp, Zea mays
  misc_feature: Incyte ID No: 700356594H1
  unsure 38-39, 46, 118: a, t, c, g, or other
gacgacacatcttgggaattggctcctatggctgaatnngtctganggagaaacgccaggattgggctgttgtctgaactgagggggccaaacgtccattgtttggttccagatcctnc

SEQ ID NO: 5414 - DNA, 177 bp, Zea mays
  misc_feature: Incyte ID No: 700356608H1
  unsure 11, 67-68, 88, 112, 124-125, 128, 131, 134-135, 138, 143, 145, 149, 162,: a, t, c, g, or other
atctcatccantgtacatggattaacatcaaaccgaataagccctgagttggactgtgaatttcagnnataagtgaattgagaaatangtgaattggattgtagaatttcanaaaaaaaaaaannggnggncgnngtnctcgngngcgngaaaccccgggcntnaannccgnggcng

SEQ ID NO: 5415 - DNA, 180 bp, Zea mays
  misc_feature: Incyte ID No: 700356609H1
aggtaagcagcaatcgcaggaaccctagcgccgccgcacccgcaggaatgggtatcgacctcgtcgccggtgggaggaataagaagaccaagcgcactgcgcccaagtctgacgatgtctacctcaagctcctcgtcaagctctaccgtttcttggtcaggaggaccaagagcaatttca

SEQ ID NO: 5416 - DNA, 168 bp, Zea mays
  misc_feature: Incyte ID No: 700356610H1
  unsure 11: a, t, c, g, or other
gcaactctacnccttcaggttgagctgaacacattatgttcaaactttcagaaatggatagcatcccacaaagcatatttgcagagcctaaattcatggctactcaagtgtgtgaaggcactacaaaggaagaggaagagttccaggaaaagaacatcaaagctgatc

SEQ ID NO: 5417 - DNA, 174 bp, Zea mays
  misc_feature: Incyte ID No: 700356617H1
  unsure 20, 40, 66, 71, 76, 173: a, t, c, g, or other
ctctctctcctgaggcgcanggtggggtggggtggggtanggagcggcattgcgagctcacaccanctgcngcgcngcgatcccgggccaccgctatcgggctatgtgatgatccgggccgtgatctcgacggctattcgcggctgaacgggcggcgggatgaacggagcganc

SEQ ID NO: 5418 - DNA, 178 bp, Zea mays
  misc_feature: Incyte ID No: 700356624H1
  unsure 22: a, t, c, g, or other
gtaatatgttggagagattttntttacccgagaagctgcgccgcgcgccaatctgatcatctccatgcgctgaagatcgttggtgcccgccatgcttcccgatgattgctgccacatcgtcgctgaggaaatttcaagccccatagctgcacatatactcgacttctactacggcgac

SEQ ID NO: 5419 - DNA, 167 bp, Zea mays
  misc_feature: Incyte ID No: 700356626H1
atctcacttgggtgtgccaaatgcgttatcagtgccagatgactaggattcaggaaacatgcgattcaaattctttgaagcttctcgagaatattacagaaatggacaggagcattgcaagcctcaatcgtgaagtggaagggctaaagaattgtagatcaattcca

SEQ ID NO: 5420 - DNA, 170 bp, Zea mays
  misc_feature: Incyte ID No: 700356627H1
  unsure 26, 79, 104, 151: a, t, c, g, or other
aacaatccttgcacccctcccctgcntcaccccaccatatccggccagcccaacgaaaatgtcgcgcgccacagctgcngtcctcttctacatcctcgccgtcnctgccctcagcgcggccgaggcaccggcagagtcaccgaaggcaggnagtcctgccaaggcaccgg

SEQ ID NO: 5421 - DNA, 177 bp, Zea mays
  misc_feature: Incyte ID No: 700356629H1
  unsure 30, 32, 47, 50, 59, 83, 86-87, 96, 100, 114, 129, 157, 176: a, t, c, g, or other
gtttcatcgtgttcaagatcaacgagaacntncagcaggtggtgatnagncaagcttgngggaccaggtggaaagctacgatntcnntcagggccnaacnttcccgccaacgangtgccgctacgtcgntgtttgattttaactttgtcactgatgngaatgccagaagagcatgnc

SEQ ID NO: 5422 - DNA, 179 bp, Zea mays
  misc_feature: Incyte ID No: 700356633H1
caatggtcccatagtccaagaaatgcatcactctctcaaagtaaaggatactatagtgaaagacatcgagatggtcgcttacacaacaatatgcccaagttttcgaaaggatctccacaagctcatgccaactttggagcaaaaggccgtccagcccaatcaaaatctccacgccatat

SEQ ID NO: 5423 - DNA, 167 bp, Zea mays
  misc_feature: Incyte ID No: 700356637H1
gatgacgcctgggcagtgcaacatggtggtggaaaggctgggcgactacctgcttgaacagggcatgtaactactacgtaccagctggaatgcatgtcgacgacgatggtttcgagtttcgacttccaataatagtaacaacaaagcaaagccttcctcccggcgta

SEQ ID NO: 5424 - DNA, 170 bp, Zea mays
  misc_feature: Incyte ID No: 700356644H1
  unsure 37, 146: a, t, c, g, or other
ggacagttgtgagagagaggggaagggatcgagagcncggcggagagcgatggcgagcggagggaagggactcaacgcgactggggagttcttccggcggagggacgagtggaggaggcaccctatggcggggaaccagctgcgcnacgccacacccgggctcggcatcg

SEQ ID NO: 5425 - DNA, 173 bp, Zea mays
  misc_feature: Incyte ID No: 700356649H1
  unsure 20, 29, 36, 41-42, 50, 52, 56, 58, 74, 79, 91-92, 95, 141, 146, 150: a, t, c, g, or other
agctaacctgatcgttttcntcatttcancttccancctcnnccactttntnctcntnatagagtcacaaagcnaaacnctaattcacggnngcnggagatgggacaaggttctcccggcgggatgggcaagcagcccggncttcngggngaccgcaagcagggagacggcaa

SEQ ID NO: 5426 - DNA, 167 bp, Zea mays
  misc_feature: Incyte ID No: 700356651H1
  unsure 14, 19, 29, 40, 42, 92: a, t, c, g, or other
atgttaaacaaggncacancattattgtnccacacatggnancgttatgacaagctaccattattcatctacataagtgataattatagctngtcataacgcttccatgtgtggaacaataatgctgtgtccatgtttatgttaaacaagtcgatgcctggaattta

SEQ ID NO: 5427 - DNA, 168 bp, Zea mays
  misc_feature: Incyte ID No: 700356652H1
gccttgcagctggaggaaaagggggagctggagaaggaggtgtgggcgaggttctacggcaccggcttttggaggagcccgttcgcagctggacgacaacgacgacaggtgatcgggacaggcccgcgagcgagctatccacaagctcctccggcgatgcgtgggctt

SEQ ID NO: 5428 - DNA, 168 bp, Zea mays
  misc_feature: Incyte ID No: 700356654H1
  unsure 37-38, 67, 98, 150: a, t, c, g, or other
cgatggtgcatagacatcagatgcaagcaatgtgaannggccatatgacacactttgtattggatgnttatcggggcaggcttgtacaagatggctanggctactgaccaacagccagcgccgaggagcacaaggattgcaatgtatcangtcttgatcgttgtggtt

SEQ ID NO: 5429 - DNA, 167 bp, Zea mays
  misc_feature: Incyte ID No: 700356661H1
gtaccctatttacagccctcttgtgagcgacaaataataaatccgaagatctcgatgcctgcgcagaagcagatgttccattgaaggaatgtatcggatttgatatttttcttaaccatctctaaattagctgctcatctagaaagcatttcggcagagattggtgc

SEQ ID NO: 5430 - DNA, 178 bp, Zea mays
  misc_feature: Incyte ID No: 700356670H1
  unsure 63: a, t, c, g, or other
aacaacatcaacaacaagacggccttcaccaaccgcaccgactacggcaagggcgagcgagangcgcagtgggccacggcacagaggacgctgcacggcctcaaccaggccaccgccacctccgacctcttcggcgacaaccagggctaccgcgagctgtcggagctcgccgagcagg

SEQ ID NO: 5431 - DNA, 170 bp, Zea mays
  misc_feature: Incyte ID No: 700356672H1
  unsure 41, 51-52, 57, 59-61, 83, 114, 126, 130, 145-146, 156, 159, 162: a, t, c, g, or other
caagcggcagagcgccccaaacaaaacccaactcatttttntttttcccanntcgcngnnngggcggcctcgttgcaacttgncagagacccagtcctctcgctttctcaccgngattcgcctcgnttcnatccgattcgattcnngagctagggnganagnggcgaggt

SEQ ID NO: 5432 - DNA, 174 bp, Zea mays
  misc_feature: Incyte ID No: 700356675H1
  unsure 24, 38, 42: a, t, c, g, or other
gctgaaaatttgtctgaagatganattgcaggattganaganatgttcaaaatgctggacactgacaatagtgggcagatcacgttggaggaactaaaaattggtttgaagagagttggtgctaacttaaaggactcagaaattacaacactaatggaagcggcagatattgat

SEQ ID NO: 5433 - DNA, 179 bp, Zea mays
  misc_feature: Incyte ID No: 700356680H1
  unsure 13, 19, 44, 64, 68, 73, 78, 81-82, 93, 105, 107, 113, 119-120, 126, 134,: a, t, c, g, or other
ccttcccaacgcnctcgcngcagaggaaaggcgaagatggcgangaccggcgaagtgcttgctnccangcgcntgcangtnntccacgagtantcgactgcaganantggcangcgctnngtacancaactggnggcccncgttagcagctcncatgnacgtccangtaccaatgccat

SEQ ID NO: 5434 - DNA, 178 bp, Zea mays
  misc_feature: Incyte ID No: 700356693H1
  unsure 63, 82, 88, 147: a, t, c, g, or other
cagagcgtgaccacatccgtccagaagccgcagcagcgagcaggtcaggtcggcagagagctncgacctctcgctgacggcnacgttncggggccggcggaggacaggaacaggacgatggccgagggaaagagatggcggttcgcnatggtctgctcctcgaacatgaaccggagca

SEQ ID NO: 5435 - DNA, 176 bp, Zea mays
  misc_feature: Incyte ID No: 700356694H1
  unsure 67: a, t, c, g, or other
gatgcctgaacctccaataacgcctggaccatttgctcctggattgtcacgcaatgaaggtacaatnccctggcattggggttgcaatgaccttggcaggccagtcttttgatggatctgatggagagcagaggccatctattccgggtcttccacctgggcaacccccgttgcca

SEQ ID NO: 5436 - DNA, 176 bp, Zea mays
  misc_feature: Incyte ID No: 700356695H1
gcaccgatggccgaggcaaagtccgccgatgcccctgtggctgacgcgccagccgatggacctagcgggccggctgctgcacctggcccccagggtgtcgaaggcctgtcaggcaatgaggatgacgatgatgactccaccaattgaggccacacacgtcggcccggttaaatttg

SEQ ID NO: 5437 - DNA, 189 bp, Zea mays
  misc_feature: Incyte ID No: 700356701H1
  unsure 12, 69, 106, 131: a, t, c, g, or other
agcatatgaggnagaagtcatgccaaccaaacagtcatataaaaaatgtggagatcagcaatcccagtncaaccaaatgggcaaatcctgaggaagtaagcatganattggatatgagaaaaggcaaaganaaagagagtgctaaatctgacgatggcatgacgttgggtgtgaatggaggcaatccaa

SEQ ID NO: 5438 - DNA, 175 bp, Zea mays
  misc_feature: Incyte ID No: 700356702H1
  unsure 102: a, t, c, g, or other
caagatccaagaactcgctcgcgcgcacggacagggccggaacccagggatcgagactgaacagcagtccgagacgccatgaacgtggaggaggaggtcggncaggctcaaggaggagatccataggctcggccagcagcagcccgatggctcttacaaggtcaagtttggcgtt

SEQ ID NO: 5439 - DNA, 180 bp, Zea mays
  misc_feature: Incyte ID No: 700356707H1
  unsure 49, 73: a, t, c, g, or other
acaaggtcgcagatttgcaggaaaagtttgaagcaattgcatgcgaganaagggagcttgagctggtgcttgnggaagttagagatcagcttgagatttcctgcgatgcgctagtggtggcaaagaacaggctggttgaaatgcagatgcagttggactcagcaaatgattccaaacttt

SEQ ID NO: 5440 - DNA, 180 bp, Zea mays
  misc_feature: Incyte ID No: 700356708H1
  unsure 2, 119: a, t, c, g, or other
angggacgtaagaggtcgtctaattcttggatcgaattagacgacttcttcgtccctctcttcattagcacgctaacttgtaatctgcaggatctaagcaaagacttgatttagttaangacggattggtaggcctcttgaaagttcgcgtggtccggggtatcaaccttgcctaccgcg

SEQ ID NO: 5441 - DNA, 173 bp, Zea mays
  misc_feature: Incyte ID No: 700356715H1
  unsure 30, 81-82, 90, 97: a, t, c, g, or other
gcactgctcgccgacccctactgctggaangcgtacggggtcatggagacgctcacgctgccaccggtgtactgcttgctnnagggcagnccggagnctctccaggatccgctcaccagttgctgagatgagatcgttttctttactaacaaagatttctctcctgagacagt

SEQ ID NO: 5442 - DNA, 180 bp, Zea mays
  misc_feature: Incyte ID No: 700356725H1
  unsure 65: a, t, c, g, or other
agcgggcagcagcacacagccccatcccaatcctagtcgatcttcttcccctcctcaaggaagancagaagctgaaccatggggaagagaaagtcagctgctaagccacctcctaagaagcggatggacaagcttgacactgtcttttcctgcccattctgcaaccacgggagtagtgtt

SEQ ID NO: 5443 - DNA, 180 bp, Zea mays
  misc_feature: Incyte ID No: 700356736H1
  unsure 37, 40, 42, 86, 100-102, 105, 107, 153, 159: a, t, c, g, or other
agaacatacagcatttcacaagacacaacataagcanggngncatgggagctgtgaagcatacattgaaaatggctttcatggctncctactcttcgcannnttngntgcggccaccacctccaagtgcacaaatgccacaaatgggactganactganagcctgggtgcaatgaaactg

SEQ ID NO: 5444 - DNA, 179 bp, Zea mays
  misc_feature: Incyte ID No: 700356739H1
  unsure 4, 9, 28, 30, 56, 62, 66, 70, 73, 76, 78-79, 92, 108, 117, 125, 148,: a, t, c, g, or other
cctngtcgncaccggcaagtgagacctngncgggcatcgcccagccgtggagagcnagaacnccgncacnaangantnngactgcaagatcngcccaactcgctggtnatggacgtngtgaacancggggataggtccgggatcacgnctgncncaactccaagttcttccacannaca

SEQ ID NO: 5445 - DNA, 179 bp, Zea mays
  misc_feature: Incyte ID No: 700356740H1
  unsure 5-6, 8, 62, 65, 68, 166: a, t, c, g, or other
gcganncncacacgaaggatcccgaagccgaagagaaccctaccgaggaggcagaaaatccntangcnccgcctcatacgattccgagatccgtgcctcttatcggcagccatgatgctgcgcgcggcgggcaggcgactcctcggcgtaggaggcggcgagccancgcccgcggtcgc

SEQ ID NO: 5446 - DNA, 186 bp, Zea mays
  misc_feature: Incyte ID No: 700356747H1
  unsure 63, 115: a, t, c, g, or other
ctcccggcgtcagacgcgcatctccagcaatggcggacgagaaacttgccaagctgcgcgaancaccgccggcctcacgcagatcagcgagaacgagaagtccggcttcctcagnctcgtcggccgctacctcagcggcgacgaggagcacatcgagtgggccaagatccacacgcccaccgacga

SEQ ID NO: 5447 - DNA, 189 bp, Zea mays
  misc_feature: Incyte ID No: 700356748H1
ccatatctcagtgcatggtttgaacatctttgttgctgaaaagatttttgaagggtcaagccatgtaaacgtcagtgcatgttatccacgagctctcatttggcccaaagtatccaggaattgacaacccactggatgatacttcaaggatacttcatgacacaagtggaaccttcaaatactatatca

SEQ ID NO: 5448 - DNA, 180 bp, Zea mays
  misc_feature: Incyte ID No: 700356749H1
  unsure 38, 41, 74, 92, 96, 105, 121, 150, 155, 175: a, t, c, g, or other
gtttcctattttcctctcctcccccacagcagcccggnacnaaaccctagtaagcaaaccaccggagcagcggngctttacgcgagcggagncatngcggacgangattacaacgaaattnacatggggtatgaggatgagcccccaganccggngattgaggaaggagctgaanaatag

SEQ ID NO: 5449 - DNA, 177 bp, Zea mays
  misc_feature: Incyte ID No: 700356751H1
cctttccaggcaatgacgcgcagtcctcaagggcatcaacagctacaggtcctcgctcaaggtcccggcgctggccgagaacaagaacgcggcgtgcctggccgagcagctcgcgaggcagttcaagggccaggagtgcaccaacacgacgggcgccaacaccgtcatcggcaccga

SEQ ID NO: 5450 - DNA, 178 bp, Zea mays
  misc_feature: Incyte ID No: 700356752H1
  unsure 3, 26, 30-32, 34, 36-37, 46, 51, 82, 91, 94, 113-114, 130, 146, 153: a, t, c, g, or other
ggngtctgcgatcacctctctctctntctnnngngnngaccataanaagcnactcccaggatggagtcactttgcgcaattnacaatagcnctnattaataaagaccctaagnnatctaagtattctganacactgcatcggtttnggaaganagagcatgattgggggtggaaaaag

SEQ ID NO: 5451 - DNA, 179 bp, Zea mays
  misc_feature: Incyte ID No: 700356755H1
  unsure 8, 24-25, 27, 44, 54, 66, 69, 79, 81, 85, 88, 93, 143, 148, 169: a, t, c, g, or other
gtgacggntccggcaccacggccnngngcgtgcgggtacaaggncacgcgcacncatgggtacggngtnccagacggtngncgtnatnaactntgctgttccgtgacggcgcggcctgcggagggtgctacgatgtgcggtgncctgnacagccctagcgggtgcaagnccgacgcgca

SEQ ID NO: 5452 - DNA, 180 bp, Zea mays
  misc_feature: Incyte ID No: 700356762H1
  unsure 17, 22, 27, 33, 58, 62, 70, 76, 96, 98, 139, 142, 152: a, t, c, g, or other
gagaaggagtgggtcgnccacntggancccggngtgctcatcaccttcctctacgctnccgnggggcggnaatggnctgaagcgcatccgattcancngtgaaatgttcaacaaatggcaagcacaaagatggtggacnganaattacgagnaggtcatggagctttacaacgttcagaa

SEQ ID NO: 5453 - DNA, 173 bp, Zea mays
  misc_feature: Incyte ID No: 700356767H1
cttctcaccagcctcctccgacacgtaaattgcaccgatcgagacacagggaacaaaggcaacagccatggcgggaacccgtgccctgtacctcctcgtcgcggctgtcgcggcgctcttagccacgcctgcggccgtggacgcggccacgctggcggagatctgcaggggaa

SEQ ID NO: 5454 - DNA, 170 bp, Zea mays
  misc_feature: Incyte ID No: 700356773H1
atttggagatgttgttccaactaagctggagcagccatttatattgaggacgccagatatgtcagccatgcatcatgactcttcgcatgacctcaaaactcttggatctaaactgaaggatatagttggggtcgcagatacttccctggaagtaagatacattactcgtc

SEQ ID NO: 5455 - DNA, 180 bp, Zea mays
  misc_feature: Incyte ID No: 700356779H1
aaggagggtacagatggtgaagaagaagccaggagagcgtacaaggctgctagggaggaatcagaccatgctgcagaggcagctgtgggagaaaaggtctcttcagctttgattgatagggttgatgctatgcttcaaaagttagaaaaggagattgatgatgttgatgctcgaattggc

SEQ ID NO: 5456 - DNA, 171 bp, Zea mays
  misc_feature: Incyte ID No: 700356786H1
  unsure 65: a, t, c, g, or other
gcggtgctgatcgcgtcgctctactcggggtactacgagaagatccgcggcatgtactacgaganccccaccaagagtggggagatcgtggcggtgttccagcccagccacgaggagcagcagcagtacacgtccaacgaccacaaccagaaggcgctggccgagatctac

SEQ ID NO: 5457 - DNA, 171 bp, Zea mays
  misc_feature: Incyte ID No: 700356787H1
  unsure 105: a, t, c, g, or other
ggagcagaggaggagagatctggcaccgccactgatgcgggaggagaggaggagaaacaggagaggagcgtcggcctgatggccggcctcatggacaaggccaanggcttcgtggtggagaaggtgatgcaaatccccaagcccgaggctgccctggatcacgtctccttc

SEQ ID NO: 5458 - DNA, 175 bp, Zea mays
  misc_feature: Incyte ID No: 700356791H1
  unsure 7, 12, 19, 39, 53, 73, 77, 90, 128, 151: a, t, c, g, or other
gttatangagangtctgantctgcagcctgcgctgcaangctctcaaagatangctgttggcaaagaacgtangcanaggaaattgcagngaagctttgtgaatgctgtcgcaggctagccttgaatnccaagaagctaggatctttcacnagaatatcatcaacagtccagagc

SEQ ID NO: 5459 - DNA, 167 bp, Zea mays
  misc_feature: Incyte ID No: 700356793H1
  unsure 10, 43, 45, 53, 58, 66-67, 69-70, 72-73, 84, 88, 101, 105, 108, 126,: a, t, c, g, or other
cgatggcggnattagcgacagcatcggatggattggtggacgnanaagcgagncagcnggaaccannanngnngaagcactggnagtngccgtggtctgcncacncanatgagcaggacataaganagggaaaggcggctctggtttccacacaacatncnacgncc

SEQ ID NO: 5460 - DNA, 180 bp, Zea mays
  misc_feature: Incyte ID No: 700356794H1
gccgaagagatgacttggaatctcttggatatgtactcatgtacttcctgaggggcagccttccttggcaaggtcttaaagcaggaacaacgaagcaaaagtatgagaaaattagcgagaagaaagttgcaacatcaattgaggctctatgccgtgggtatcctactgagtttgcatcat

SEQ ID NO: 5461 - DNA, 176 bp, Zea mays
  misc_feature: Incyte ID No: 700356796H1
  unsure 40: a, t, c, g, or other
cattctcttcccttcccttccctgagcaaagagaagtagncacaagcatgtctggcatcatcgacaagatccaggagacgctccacatcgggggcgaccacaaggaggagcacgagcacaagaagggcgaggagcaccacaagaagggcgaggagcaccacaagaaggacgacggg

SEQ ID NO: 5462 - DNA, 299 bp, Zea mays
  misc_feature: Incyte ID No: 700356801H1
  unsure 7, 13, 117: a, t, c, g, or other
accaganctcctnactgttcctctctccctcctcacgggcgggctccgtctgttccgtccatccaccgccccggtcgtctcccggccagatccctgctcctgcaaggtttctttgcnagtggccggagaagatgatgggcgggttcctctccagggtcctcctgctggcttttggctatgcctatctgcctatgaatgctacaagaccgttgaactgaacaaaccacagattgagcagctcatattttggtgtcagtattggatttagttgccctgttgacagttttggagagattgga

SEQ ID NO: 5463 - DNA, 168 bp, Zea mays
  misc_feature: Incyte ID No: 700356802H1
  unsure 17, 38, 80, 92, 153: a, t, c, g, or other
taaagaaatgaaatggncgcaacggccccggcaacgcngccagccagcgtcacgtttaccctcctcccctccggtccgtncacgcgcccgtncctctcctctcctctcctgctccgatccgtacgcaaacgcaacgccgcccgccatgccgcncgcttcgccttggat

SEQ ID NO: 5464 - DNA, 294 bp, Zea mays
  misc_feature: Incyte ID No: 700356804H1
  unsure 71, 191, 223, 240, 244: a, t, c, g, or other
atgaagtagcatgaaactgaatagttcaacagtgaacagtgtaaaagcataggtcttctcatttgagcttnctggtcaatttgtacagagactgatcgtggaattcttccttctttcttattttgatggcacccagttagtatacaaagttgcatatccacttggatgatttagttagtgaggccacaggntaagatgagctttgcactgctcaatggctcgnaatagttttgaggaagnaggntgctcctgcgccagcaggtgatgattcattgagcagtgcaaatgggtgtc

SEQ ID NO: 5465 - DNA, 166 bp, Zea mays
  misc_feature: Incyte ID No: 700356809H1
  unsure 164: a, t, c, g, or other
gctagagcggccttcctcgccaggtgcaaggccaacttccgaggctaccctcggcacctacaagggtgatgctgccgccgacaccgagagccttcacgtcaaggactacaagtactgagttgcttctcttgcgatcccgttgttttggaactcctgcctggganta

SEQ ID NO: 5466 - DNA, 297 bp, Zea mays
  misc_feature: Incyte ID No: 700356810H1
  unsure 215, 275: a, t, c, g, or other
cgattggattgttgttaaacactattgctatcttctaccgatcattagcagctataccatttggcacaatggttgtcatgtttattctttgggctttcatctccttcccgttggttctattggggactgtagttggtagaaattggagtggtgctcccaacaacccgtgtcgtgtgaaaacgatcccgcgccgccattccctgaaaagaagtggnaccttacaccttctgttatttcactgatgggtggacttctccccttcggcagcatcttcnattgagatgtacttcgattcac

SEQ ID NO: 5467 - DNA, 291 bp, Zea mays
  misc_feature: Incyte ID No: 700356813H1
  unsure 14, 16, 20, 23, 109, 112, 119-120, 126, 143, 176-177, 184, 187, 194,: a, t, c, g, or other
aaggactgcggtgncntctnttnctccctggcatggaggaagtagctgtttcgcctatgatcgttgccgccgtagtgctggacaacaatggcgctgacgcggtctcctncantgccatnnctagcngtagcaataaggcctangaggagaaagaaaatatccaatgggggatgttnncacgatncanctcgggnccgcanagcnaacgnaggaggnaggncgttgttcngtgttcggagngtgcnaccaagggacgatggccnncgnttgangagggaatgctccacnccc

SEQ ID NO: 5468 - DNA, 151 bp, Zea mays
  misc_feature: Incyte ID No: 700356816H1
cgagtcacgattagcaattagagttagactctgcttttgctttttcggtgttgatgaaatagttagcgggaacggcaaataagcacttttttttgtagaagatacacaaagctttttttttgtaggtgtagttaaaaaagattgataaaat

SEQ ID NO: 5469 - DNA, 292 bp, Zea mays
  misc_feature: Incyte ID No: 700356817H1
  unsure 132, 154: a, t, c, g, or other
gccgaaacaactcttacttagttcaagttctacacaacgaagtcccagtttcaatgcctgggtgcggcaacaaagatttctgtccgttcgaggagttcaaggagaaaattgtgaaaccgcacctgaagcacnactacaacatgatatgcaaggncaaatccccagcggcaagcgaggagcctgcctcgtacgcctacagggtgtccagtttcttcctaggatcctctcgcaaaaagggtacgcggtgtggcgccgaggggtcaagatgagctgtaggcgtcaagactagcct

SEQ ID NO: 5470 - DNA, 293 bp, Zea mays
  misc_feature: Incyte ID No: 700356819H1
  unsure 228, 235, 290: a, t, c, g, or other
caggacatatggtggtactggaattggattgagcatcagcaaatgtcttgttgaactaatgggtggtcagataaactttgtcagccgaccacatgttgggagtacgttcacatttactgcggttctcaaaagatgtgacagaagcgctattggtgacagtaagcctgttatgttgcatcctcttccatccagtttcaaaggtttatctgcactattggttgatagaanaccagtnagagctactgtaactaagtatcacttgcaaaggctgggaattgcctgtgagttgntgc

SEQ ID NO: 5471 - DNA, 293 bp, Zea mays
  misc_feature: Incyte ID No: 700356821H1
  unsure 31, 39, 114, 144, 175, 182, 211, 251: a, t, c, g, or other
cacaccttctataacgaactccgtgttgcgnctgaagancaccctgtgtgctgaccgaagccccacttcaacccaaaggctaacagggagaagatgccccaaatcatgtttganactttcaatgttcctgccatgtatgtcgcnatccaggctgtgctttccctgtacgccagtngacgtanaactggtattgtattggactctggtgatngtgtcagccacacagtgccaatctatgaaggttatgcccntcctcatgccatcctgcgccttgcaccttgctggggtgactg

SEQ ID NO: 5472 - DNA, 297 bp, Zea mays
  misc_feature: Incyte ID No: 700356823H1
  unsure 23, 58, 60, 69, 72, 79, 81, 89-90, 103, 107, 158, 163, 178, 183, 189,: a, t, c, g, or other
aaaccagacaagcaaggaatccnccgatggctcatcgcgttctcctcctcctctactntngcgtcggcngcngcggttncngccgccgnncgacgcggagganccgntgatccggcaggtggttcccggtggagatgacaacgatctggagctgaacncggantcccacttcctgagngtcgngcagcngttcagtaagtcctacaaggacgccgacgagcacgcancaacnggntgtccggtttcaangncgaactnacgccggnannncagnagcagctggnggaccagtggngg

SEQ ID NO: 5473 - DNA, 294 bp, Zea mays
  misc_feature: Incyte ID No: 700356827H1
  unsure 57-59, 109, 183, 197, 209, 228, 252: a, t, c, g, or other
aggtaagcagcaatcgcaggaaccctagcgccgccgcacccgcaggaatgggtatcnnnctcgtcgccggtgggaggaataagaagaccaagcgcactgcgcccaagtnctgacgatgtctacctcaagctcctcgtcaagctctaccgtttactggtcaggaggaccaagagcaatttcaangctgtcattctcangaggcttttcangagtaaaaccaaccggacnaccaatctgccatgcgcggcttgngcagtttatggaaggaaaggagaagaacattgcttgcattgt

SEQ ID NO: 5474 - DNA, 285 bp, Zea mays
  misc_feature: Incyte ID No: 700356832H1
atgctgctgtgggggaaggagaaagaccaggagcggggcacgggcaaagagcgggaacagctcgagacggactgcgagaagcaggcgaagaaggtcagcgactgtgtctacgaagcgcccaagacgacgaagtgactgccgccggccatgagcggcagacggctcaatcaagcgccatgccgtgctccagttcggttctatatttgtgatgtacagagtcaccgatccggtctcgcctcatcagctatgtatatatatgcatatgcaatgcggcaaagacagacg

SEQ ID NO: 5475 - DNA, 294 bp, Zea mays
  misc_feature: Incyte ID No: 700356833H1
  unsure 10, 46, 58-59, 91, 99, 127, 145, 204, 216, 218-219, 261, 268, 284: a, t, c, g, or other
gcgttcaaancttgtcggatgtggatcagccatgcccaacacttgncgtttcaaatgnngacctttcaaaaatagttgagacgtcagatgnatggattncagctcgaactgggattcgtaacaggcnagttctttcaggagatgnaacattgcgggggctctcaataaaagcagctcaaagggcactgcaatggccaaagtaanagctgaagatgntnncctgttctcctttgtacatctactccagatgatttgtttggnggtgccnctcaggtgctgacggncgtggggtgc

SEQ ID NO: 5476 - DNA, 293 bp, Zea mays
  misc_feature: Incyte ID No: 700356835H1
  unsure 151: a, t, c, g, or other
cgtgcgtccgtggctttgcatctgcaaccccgcccgatcaatcttcctcgttccgccgctccctcgcctccggcagcgaggtgaggccaccgatcggaccttccctagcggcggcgcctaccaacctcaaggagcgatggctctgtctgcnacgctacggatttctcttagcgtcgcgttctttggggttctggcgttcgtgcttggtgtcatcgccgaaaacaaaaagcctgcttccgggactcctatcctaggaaaggatgtcgtcatctgcacgtttccaagtgatccga

SEQ ID NO: 5477 - DNA, 291 bp, Zea mays
  misc_feature: Incyte ID No: 700356838H1
  unsure 18, 38, 60, 75-76, 97, 139, 159, 166, 171, 175, 205, 211, 217, 246, 282,: a, t, c, g, or other
gtgtactggagaggaggngctcttctgaagacaatcantcctccagggtttcatctgaanctccctttgattcanncagtacgagccaatacaggtnacacttcaaacagaccaggtcagagatattccttgtggaacnaaaggtggtgttacgatcanctttgancaganagangtcgtgaaccgccttcgcaaagagttgtgnatgaanccctantgaactatgggtgtgcacgatgacgaganatggatatatgataaaatccatctgagataatcagntctggangg

SEQ ID NO: 5478 - DNA, 291 bp, Zea mays
  misc_feature: Incyte ID No: 700356844H1
  unsure 20, 22, 55, 211: a, t, c, g, or other
gagatggctaatatttccgngntttttattgggttgatgtgttcatatgattttnttaagaacaacagtaaaatacaatgaatcctggaaagcaagttgtgctaagttatataattttagtaaaacgtattcatgtcttgatactgatgtaattctgaatttctgatgtgagattccaacttaagtacctaactgctttcccagttgccgnaacttgtagggtattaccattcttatgtcacttctcctgaacttgcatgatattcaccattcgtatgtcattatatagca

SEQ ID NO: 5479 - DNA, 297 bp, Zea mays
  misc_feature: Incyte ID No: 700356845H1
  unsure 191: a, t, c, g, or other
cgtatatcctttcctgagtaggagagagagttgagttaggagttgttgtgctgatcatctcggtcgaccgagagatggaccaccacttcactgagatagaggggaagatggcgcacgagccactggcacacagctccaccttctccgatgagacgaaagacaaatggagcacgattcactggtgtacagtnccacgcagcatcgcgagggccacaaccaccgggcatccctgttcggcgatcaaggctggccgtgctacgtggggccgcttatcgtgggtgcagggccggcgggtct

SEQ ID NO: 5480 - DNA, 128 bp, Zea mays
  misc_feature: Incyte ID No: 700356847H1
  unsure 40, 79, 82, 94-95: a, t, c, g, or other
ctgtttttataagttgcatgaacacagcaaaccaaacaanggctatggtcatcctggttaattgcaatcaaagcccttncanggtttgctgtanntataagttgcatgaacacaacttctgtttggtt

SEQ ID NO: 5481 - DNA, 291 bp, Zea mays
  misc_feature: Incyte ID No: 700356848H1
ctgataacccactttatggatcttcactgattgattatgcccatattgagcaatggattgactttgctgcaacagagattgatgcaaacattggaaagtggttgtacccacggatggggttttatccccatgctggtgtggtagaagaatcaactattgctgccttgaagagagcattgggttctctgagcacccatcttgcatcaaacacattccttgttgggcatcagtgactctcgcggatatcgtgatgacatgcaatctctgtatgggattagccgtatctgacta

SEQ ID NO: 5482 - DNA, 291 bp, Zea mays
  misc_feature: Incyte ID No: 700356849H1
gaaggttttcgtggagcctggttcgaggcgactgttgttaaagctgtcggcagcaagttcctcgtggagtatgctacgctgaaggccgatgacgggaccaagcctctgaaagaatctggagggcaaggtctgatgtgccactgatggattcaaactacttgacgaggtcgatgccttctgcaacgacgcgtggtgggtcggtgtggtatccaaggtcctcggcgagaagaggtgcacggtctacttcaggccttggaaggaagagatggagttcgagcatgcgcactgagg

SEQ ID NO: 5483 - DNA, 290 bp, Zea mays
  misc_feature: Incyte ID No: 700356858H1
  unsure 54, 159, 205, 244: a, t, c, g, or other
ccaacttcaccttcgagcagtctgccatggtcaaaggctcagcggactacgtcncccatacaaccactacaccacgtactacgccagcaacttcgtcaacgccacagagaccaactaccgcaacgattggaatgcaaagatttcgtatgagcgagatgngtgtgcccattggcaaaagggcgtactcggactggctttacgtcgntccatgggggctctacaaggctctgatttggaccaaggngaattcaacagccctgtgatgctcatcggagagaacggattgaccc

SEQ ID NO: 5484 - DNA, 287 bp, Zea mays
  misc_feature: Incyte ID No: 700356860H1
  unsure 32, 58, 95, 97, 100, 154, 168, 170, 184, 186: a, t, c, g, or other
aacacgccgaggcggtggctgcagctgcggcngcgcgccggtatttcgatttgtctcntgaagcaagcgcagaatgccagctcttcccgcttttncnctnacccgccgcccatccgatgccagacgccgcggtcgcctcgtcctttccctcgtngtcttcgttgtgtntnccgccgccgcagcntnccatacctatctttccctctgccgggcggacatcgcccccggcggtccggacggaggtcgactgctgcaggggtatggaggctcgagctctggggcccggc

SEQ ID NO: 5485 - DNA, 289 bp, Zea mays
  misc_feature: Incyte ID No: 700356864H1
  unsure 169, 183: a, t, c, g, or other
agaaatcctagaagtagcacagccaaaattggagccatttcccttcgacaaggacaccgacctaccagtttaaacactccaatgatgcaaactacaggaagaatcacgagacacttaaaaaatcaagacaaatagtaagcctattgtcgagcagtagtctattaactanataaaatgctgtgnggagcatattataatcgcatattgccctaataatattgtgttgttaaacctgaggctgatggttatctgatgagttgtaataatagccttggtctccgttgtatgt

SEQ ID NO: 5486 - DNA, 289 bp, Zea mays
  misc_feature: Incyte ID No: 700356868H1
  unsure 39: a, t, c, g, or other
acggagaagggcagctgcctcgccaccgacagccacatnacgtgcaaggacggcaaggtctcccaggacatcctgctgcaggctcagggacaccgagaccggcgacctcgtcctgcgcctgacctgggtcaacatccccggcgtcgcgcggtgaatcatcccctcgatcggcggggacggggccagggcatgaggcggcggcgacccgaccgacgcctgcccagctgattatacatccgtttacctggtattggcataaggagacccttggatgcgtgtaatgtttgtt

SEQ ID NO: 5487 - DNA, 133 bp, Zea mays
  misc_feature: Incyte ID No: 700356878H1
  unsure 19, 38, 40, 54, 89, 94, 99-100, 116, 124: a, t, c, g, or other
aattttatcaacgcttctnctgctggttactccgcgcncnttctctttctctcncggacgtcgatcgtgttcttcaggacgggctagcnagctncctcnntccgagccatggcgangccggagnaacaagggg

SEQ ID NO: 5488 - DNA, 291 bp, Zea mays
  misc_feature: Incyte ID No: 700356879H1
  unsure 138: a, t, c, g, or other
atctttcggtgctaggtggatcaccgtctaaacaatccaccaccagaaccgccctaccccaagatagctccatctcagtcgttgtacccattcaatggcgagctggtggcagcgatgtaggagatgatccatgacgangtgcacaagtacatgttagtggacgacacctggccaaagatacacaatttctactgtttttcagttggagaaaacatttaagacaatattttctcgtttgttctcccatatggggcttgttccacgccacttgaaggaagaagggaatggtgg

SEQ ID NO: 5489 - DNA, 288 bp, Zea mays
  misc_feature: Incyte ID No: 700356881H1
  unsure 23, 30, 41, 45, 91, 167, 182, 211, 217-218, 242, 281, 283: a, t, c, g, or other
tgcttccagaaggacatcctggnccctggngtacatctgcnagtncaatggcctgtcccgaggtggccaactactggaagcaggtgatcangatcaacgactaccagaagagccggttcgtgaaccgcgtcgtgttcgtccatgttcaacaccgttgccggcaagangatcgccgtcctcgncttcgccttcaagaaggacaccggcgacnccaggnngacaccggccatcgatgtctgcanggtctggtgggtgacaaggcccagatcagcatctacgancnccagt

SEQ ID NO: 5490 - DNA, 288 bp, Zea mays
  misc_feature: Incyte ID No: 700356884H1
  unsure 11, 22, 29, 45, 48-49, 53, 67, 74-75, 77, 79, 123, 127, 143, 153-154,: a, t, c, g, or other
tgacggcagcngaggccgagancctcaanaagaggaaaccatgcnccnnctcncaagtggaaggagntgacagnnancngtatatttacagctgaggacgagggtgaagaatatcaatccgcnaatntctctgcaattccgtncggacggctnnannaaattatcangcaatcagtactatnagccaganatacatttgcctaggaatgaagcatctnctccaaagaaggcaanttcgntcagcagaggtngcnaagcaggcgcnagctcaancggcggntctgnanc

SEQ ID NO: 5491 - DNA, 200 bp, Zea mays
  misc_feature: Incyte ID No: 700356886H1
  unsure 14, 39, 42, 125, 135, 149, 190-191: a, t, c, g, or other
cttgactatcagcnatgtatagtgaaggactatgtatanccnttgttgccaatcttgtttatcgcattagattatggagttgtttaatctgctggtttctgcaatataacatggaatccagtccnattagatggngacttgtaggtgtnttagttgggatgcaaagttttgcacgtcaagtttcagcagnnagatttccc

SEQ ID NO: 5492 - DNA, 285 bp, Zea mays
  misc_feature: Incyte ID No: 700356896H1
  unsure 170: a, t, c, g, or other
gatttggtggttagggatccctagaggatccatgggggagaaatccccttgcaattcaattttgaatagcaagaggatttcttccccagggatccccggtcaccaaatcagccctcagtgtcaactcctcctctccgccgccaacagctgcggggagctcgccagtcgcnacttcgccagaatgttgcatcagtgccaggcagtgggtcgcgcgctgccagtccccgctcaagtctcaagaaggtttaagagcaacggtcagattctcgccatagacgagatctg

SEQ ID NO: 5493 - DNA, 186 bp, Zea mays
  misc_feature: Incyte ID No: 700356901H1
  unsure 26, 105: a, t, c, g, or other
cgctcagcaacggcgtctcctacgcngtgcaacctcgtggtactggcgctgtacgtgaggctgtcgggcgcgtgcagggagacatggaaaggcttctcgcgggangcgtttaaggacctgtggcgattcgccgagcttgcctggccgtccgccatgatgatctgcttggagtggtggtcgtttgaa

SEQ ID NO: 5494 - DNA, 180 bp, Zea mays
  misc_feature: Incyte ID No: 700356903H1
taagccgtggcctctcttccgtaagccctagcccctagccgccagtgtcgtgcattcgtgctgaggctcaactgctgatccgtcttccaagctctggtatcatccctgagcactgatttaagatgtatctccagtactacatcaacgagaagggggacaaggtctacaccaccaagaagg

SEQ ID NO: 5495 - DNA, 180 bp, Zea mays
  misc_feature: Incyte ID No: 700356904H1
  unsure 139: a, t, c, g, or other
gcccgaggaccgggctactgccgtccgccgcaagccccgtcctgcactcctgcatccgttcacgttttaccccgtccggccgtccccctcgttctttctctcccccttctctctcgctgcgacgactgggtaggctgcngccgccgccctacgccaggtcccgaggaccaaggcattcgt

SEQ ID NO: 5496 - DNA, 180 bp, Zea mays
  misc_feature: Incyte ID No: 700356908H1
catcttctggcttctttctatgtttctttgatcaggcggctgcaatgggaggtagcggaacgtgatctcggtgtaccccgaggagctcaccttcctgtttgagctggagaagccgtgctattgcaacctcaaggtggtgaacaacagcgagcaccacgtcgcattcaaggtcaaaacgac

SEQ ID NO: 5497 - DNA, 51 bp, Zea mays
  misc_feature: Incyte ID No: 700356915H1
  unsure 6, 20, 28, 35, 46-47: a, t, c, g, or other
cttgantatcagctatgtanagtgacgnactatgnctataccttgnngcca

SEQ ID NO: 5498 - DNA, 180 bp, Zea mays
  misc_feature: Incyte ID No: 700356919H1
  unsure 47-48, 115: a, t, c, g, or other
gatcggggtcgtggcctctgtggcgatgaacctcgcgtggcttgcgnntggtcccatccgccagcgctacggggagatcaccacggtggaggcgtcccgaggcaagccgccggtnactcaggactccgtcgtcatcctcgatcacggcgacccgtcatgtacgaggagttctggcgccgc

SEQ ID NO: 5499 - DNA, 177 bp, Zea mays
  misc_feature: Incyte ID No: 700356920H1
gcaaaacaccttcacgacaccgaccgggagggagatttagaacaccctatgcggagttcctcaagtgcgatatgtagggatggatggcctcggaccatggcgtttccttgccggtacggtccgtcgtcgtgccgctaaggttgggcagacctgggcatgcttcgaagggctggcatg

SEQ ID NO: 5500 - DNA, 179 bp, Zea mays
  misc_feature: Incyte ID No: 700356921H1
gtgacatatcagcatagatcttgacaagcgaagaggaggaaaccacggttacgaaagacgttttccaagacaagtagcgtaatatatgttgctgcgttttctactttttgtacatgtcctctgggcccgaatggccagtgactgtaatagcacctaagtgcccgagactggtaaggggt

SEQ ID NO: 5501 - DNA, 179 bp, Zea mays
  misc_feature: Incyte ID No: 700356922H1
aatgaataccaagaagaatgttgttctttgctgccttcttttcgtgctcgttctgcatgcagatcacgctctagccaagtgtggctatacaactcctttaattccattctgcaaagcgtggatgtgcaaggcggagtgttggacggaggcaagttaactggaggcaaagtcacgcaaca

SEQ ID NO: 5502 - DNA, 178 bp, Zea mays
  misc_feature: Incyte ID No: 700356923H1
  unsure 152, 161: a, t, c, g, or other
ggaaatcgggagggagaccggagacgagaccgccggagatggagccgagatctgcaatctacagatccggcgccctccttctcctcgccgccatcattgcggaggtcgtcatccccgcatccgccatcggagacaagtgcgccgcctgcaanccgttgctncggactggagattggaa

SEQ ID NO: 5503 - DNA, 109 bp, Zea mays
  misc_feature: Incyte ID No: 700356924H1
cccgttctatggcaatcagcagcaagtgagctgacctggactaccgcgacacgcacgcctcgctcggagctggagactggaggtgttaggcgcttaggtgtagctctcg

SEQ ID NO: 5504 - DNA, 174 bp, Zea mays
  misc_feature: Incyte ID No: 700356927H1
  unsure 38: a, t, c, g, or other
gggcgcaggatccgttctacatcgtccgggaggagatnccaggagtcgattgataaattgcaaagtaacttccaccgctgggagcaaactgcttcaaacacaggagaatatgttcatctgacaaaggagcttctgaccagctgtgaaagcatcgagtggcaggtagatgagctg

SEQ ID NO: 5505 - DNA, 171 bp, Zea mays
  misc_feature: Incyte ID No: 700356928H1
gtaacgatctgtgggctgatgtgtaagtggattgaataagctgagtcagagcatacgagaattctcatgttgtacacttgtgttttatgaaccgcataaacactcacgacgataaaagaagcctgttttcggagcgacagaagctcctgcgatcaggatttcggaaaaaaa

SEQ ID NO: 5506 - DNA, 171 bp, Zea mays
  misc_feature: Incyte ID No: 700356931H1
  unsure 24, 28, 33, 46, 123: a, t, c, g, or other
ggcggaccgatgagatcgatcgcncganccccntcacgtccggggnccgcattctctttccgtcccggggaaaaaagaaggaaaccgaaccttggcagcggcgtgccggcaggcatgtcagcnacggtagccggccacaggtccagattccggaaccgaaccaccgtcccc

SEQ ID NO: 5507 - DNA, 184 bp, Zea mays
  misc_feature: Incyte ID No: 700356933H1
gcgctcagcaacggcgtctcctacgccgtcaacctcgtggtactggcgctgtacgtgaggctgtcgggcgcgtgcagggagacatggaaaggcttctcgcgggaggcgtttaaggacctgtggcgattcgccgagcttgcctggccgtccgccatgatgatctgcttggagtggtggtcgtttg

SEQ ID NO: 5508 - DNA, 184 bp, Zea mays
  misc_feature: Incyte ID No: 700356935H1
  unsure 2, 10-11, 26, 44, 59, 68-69, 72, 83, 86, 121, 134, 146, 155, 179: a, t, c, g, or other
angccgtggnntctcttccgtaagcnctagcccctagccgccantgtccgtggcattcntgctgaggnncangctgctgatcngtnttccaagctctggtatcatccctgagcactgattnaagatgtatctcnagtactacatcnacgagaagngggacaaggtctacaccaccaagnaggag

SEQ ID NO: 5509 - DNA, 176 bp, Zea mays
  misc_feature: Incyte ID No: 700356936H1
  unsure 7-9, 13, 35, 40, 55, 57, 68, 88, 97, 99, 137, 143, 151-152, 159,: a, t, c, g, or other
aggcatnnncgtngtccaccccaacagcattcggntcgtncaccatcaacggcancngcctcgtcatncaggcctgctacctcactancttcttccncnattccgacagccagaagcgcaagaaggcgttcgcgatnctggcngtggaganntgttcangcnngcngtggngctcg

SEQ ID NO: 5510 - DNA, 179 bp, Zea mays
  misc_feature: Incyte ID No: 700356938H1
  unsure 4, 32, 34, 111, 175: a, t, c, g, or other
aganaggattgtccttccacgaaaactgccananggatcaaaaggagcccacggaagagaacctggctgcaccatggaaccagctgaaggatcttgattttcagcaaccanacaaagaccttagagcacttaaacagattttggattctgcaaaaggactattagaaaataaganacgg

SEQ ID NO: 5511 - DNA, 178 bp, Zea mays
  misc_feature: Incyte ID No: 700356940H1
  unsure 15, 18, 23, 25-27, 30-31, 50, 53-55, 102, 105, 122, 157: a, t, c, g, or other
gatactgaatcatangcncaggncnnngtnnaggttgaactaggactgcntgnnngttactgtcctagttcaacctcaacgtctcctgggttatgattcgtntcngacaagcagttccttcngcatatacttactgtatagttttattttaaagctnctggcccatgaagcctctgca

SEQ ID NO: 5512 - DNA, 178 bp, Zea mays
  misc_feature: Incyte ID No: 700356960H1
caggcctgtcactctagtcgggttctcgctgggggctcgtgtggttttcaagtgcctgcaggagttagcgcactggtgaaataatgtggggatcgttgagagggcggtgctcatcggtgcgccggtctcagttcaaggtgagatgtgggagcctgccaggaagatggtcgccggaagg

SEQ ID NO: 5513 - DNA, 138 bp, Zea mays
  misc_feature: Incyte ID No: 700356964H1
  unsure 2, 7, 20, 35, 99, 136: a, t, c, g, or other
cngccanccccgtagcgagngggagggcggaagangatgagcgcgtccaggttcataaagtgcgtcacggtcggggacggcgccgtcggcaagacctgnatgctcatctctacacctccaacaccttccccaccgnct

SEQ ID NO: 5514 - DNA, 170 bp, Zea mays
  misc_feature: Incyte ID No: 700356966H1
  unsure 28: a, t, c, g, or other
gctgttgcagttgcaggtggtgtctggncgcttgcggtagccggtagggggttcgctgcgggtggtcggcggcgcgatggtttccttcgagatgaacgacctcaagaagattgggctgggcttgactggatttggagttctattcacattgctcgggatcattatgttgt

SEQ ID NO: 5515 - DNA, 172 bp, Zea mays
  misc_feature: Incyte ID No: 700356970H1
  unsure 149: a, t, c, g, or other
gacctcggcgtcccaccgaagacgacctcacgcggagtggggaatattccttcgcctccgtgctccctttagcaccaactgtcacggccgcttccagcacgcatcattctcgtctcccgtctcgagagattgcagggggcggcgtcgangctggaggaagcggacgggttcg

SEQ ID NO: 5516 - DNA, 175 bp, Zea mays
  misc_feature: Incyte ID No: 700356974H1
actatgatgtccatgttcttggtattgatctttcggtgaacatggtttcatttgcaattgaacgtgccattggacgcaagtgctctgttgaattcgaagttgctgattgcaccacaaaggattacccagaaaatagttttgacgtcatctacagccgtgacaccatccttcacat

SEQ ID NO: 5517 - DNA, 174 bp, Zea mays
  misc_feature: Incyte ID No: 700356977H1
  unsure 94: a, t, c, g, or other
ggggcaaacgctgctccgttcccgggtgcaccaagagtgcccgcggtcgctctgattgctgtgtgaagcacggtggtggcaagcgttgcaggtncgatgggtgtgacaagagcgcacaggggatcactgacttctgcaaggctcatggagggggcaagcgatgcgcttggagca

SEQ ID NO: 5518 - DNA, 176 bp, Zea mays
  misc_feature: Incyte ID No: 700356978H1
  unsure 14, 18, 23, 26, 49: a, t, c, g, or other
aagcaatccttganatantgttncangctatctcctgtttaggatttcnaggattgcttcccctcagtcactcccatcgcaacaggagatagcatgaaacagtatttggttcaggtactgcaatgctgggggtcatatctcatatgcctgttccgatctgcatataataatagggt

SEQ ID NO: 5519 - DNA, 157 bp, Zea mays
  misc_feature: Incyte ID No: 700356979H1
  unsure 131: a, t, c, g, or other
ggatgacatccatgttgcatatgtacgcagtacatgtctcttcttcaagagtcaagactagctgtaattgagctgagcatacttggtgttgctgttgttcagttaatttgcaaaaacgcacaacacaaganagaaggagaaaaaaacagagtggaaa

SEQ ID NO: 5520 - DNA, 170 bp, Zea mays
  misc_feature: Incyte ID No: 700356981H1
  unsure 2, 4, 22, 34, 96: a, t, c, g, or other
ancngcgccgcaatagctcgcnccctcgttcgcngcctctcctgctcctaccgcagctctccctcaggtttagtgttcgcaatggcggccttcaancagcttggtggccttctaaggcacagtgctctggtgagcggtatcatggtggctcttctcctgcagtgttcaat

SEQ ID NO: 5521 - DNA, 172 bp, Zea mays
  misc_feature: Incyte ID No: 700356983H1
  unsure 21, 24, 61, 66, 73, 75, 78, 80, 87, 91, 109, 129, 144-145, 161: a, t, c, g, or other
gaacatactggagcatggtgntgnagtggatatgggctaacgtaattggagtggactctancaagnacatggnanatnangcaaggnctgnctattgtgtctgctggantcccatcatcaaggcttcanattcagaagaggttnntgaagccttgccagtngaagacaattc

SEQ ID NO: 5522 - DNA, 170 bp, Zea mays
  misc_feature: Incyte ID No: 700356984H1
  unsure 41, 139: a, t, c, g, or other
atttttttctcggttgcaatgaagagttatccgtgggcggnggcccgccctgcttgccgtcgtgcagctcctcctcttcctcgcccacctcgtcgaccgcggcggtgctgccggtggaggcagcaagggcagctcggtntaccggcggctgtcgtctacccgcatcactc

SEQ ID NO: 5523 - DNA, 173 bp, Zea mays
  misc_feature: Incyte ID No: 700356992H1
  unsure 2, 53, 105, 136, 141, 158, 168: a, t, c, g, or other
cnccagcagttctgagctagctatggcgatgatgatgagagcattggcagcancggccatcctggccacggcgtttgccgtgtcggcacgagccgagcccccgcngtgcgcgccaactccaccacggcgctctgcncctantgcctgtgctgcagcanatggggcttntgcgg

SEQ ID NO: 5524 - DNA, 177 bp, Zea mays
  misc_feature: Incyte ID No: 700356993H1
gcggcgctcaagacccggctgggcatccccatcatctacggcatcgacgccgtgcacggcaaacaacgacgtctacaacgccaccatcttcccccacaacgtcggccttcggcgccaccagggacccccgcctcgtcaagcgggtcggggaggccacggcgcacgagaccagggcca

SEQ ID NO: 5525 - DNA, 91 bp, Zea mays
  misc_feature: Incyte ID No: 700357101H1
  unsure 2, 39, 43, 45, 52, 74: a, t, c, g, or other
angcgcagaggcaaccgagcaggagcgcagccagcaagntcangntcgagcnctactgcaaccgccgctgctancgcactgaacaccatgg

SEQ ID NO: 5526 - DNA, 319 bp, Zea mays
  misc_feature: Incyte ID No: 700357108H1
  unsure 2, 7: a, t, c, g, or other
gnaagangtcgcctaattctttcgatcgaattaggcgccttcttcgtcccacgctccgtctttatttgtaatctgaagcttacaggaacatttgagtggatcatggacggattggtaggcctcttgaaagtccgggtggtgaggggcatcaaccttgcctaccgcgacgcaagaggcagcgatccgtatgtcgtcctacgacttggcaagaagaaacttaagacgagcgtgaagaagagatctgtgaaccccatctggcacgaggagctaactctgaccgtcacagatcccagcctagctctgaagctggaggtgttcg

SEQ ID NO: 5527 - DNA, 273 bp, Zea mays
  misc_feature: Incyte ID No: 700357110H1
  unsure 159-176, 228: a, t, c, g, or other
gaggaactatggtgtgttggcgatgtctccaagtgaacccccgtgtgtttgttgccacgtgtgctgctccgggtaaggccctggatcattctgtaatgtataaagtcctaagcacaagcttgctgctattgtttcatccctggtagcgtaccaggtccnnnnnnnnnnnnnnnnnntcttgtgtgtgtttgtttgggtgacaaattgatgaagtggccgacgagcttnagctcccgccagttcggatgatgtatacaaaatgttgtcagttcc

SEQ ID NO: 5528 - DNA, 322 bp, Zea mays
  misc_feature: Incyte ID No: 700357114H1
  unsure 48, 122, 167: a, t, c, g, or other
ccacaagggcatcacatcttgagatacttaagaggagtcagatggagncagattgatcagctagagcagaaaaacacagaaactgtggagaaacatcggcttctggaagaggaaaagttatntgcaaataaggagaatattaagctacaaaagcatgtccaagaccncgaagttcagctccagctagcaaagcagaagcttaaagttactgaggcagaaagcaaatgcaaagaagagagatatgaagcgtcagtggaagcactgcgggcagagatctgtcatcttgaacaattagtaccagcagtttcaggagagtcagctt

SEQ ID NO: 5529 - DNA, 313 bp, Zea mays
  misc_feature: Incyte ID No: 700357122H1
  unsure 2, 5, 28, 97, 115, 197: a, t, c, g, or other
angangtcgtctaattcttggatcgaantagacgacttcttcgtccctctcttcattagcacgctaacttgtaatctgcaggatctaagcaaagaantgatttagttatggacgnactggtaggcctcttgaaagttcgcgtggtccggggtatcaaccttgcctaccgcgacgcaagaggcagcgatccgtatgtncgtcctacggcttggcaagaagaaactgaagacaagcgtgaagaagagatccgtgaaccccatatggcaagaggagctaatctgaccgtcacagtcccagccaaccatgaagtggg

SEQ ID NO: 5530 - DNA, 321 bp, Zea mays
  misc_feature: Incyte ID No: 700357132H1
cttctggtgcttctacttctaggttttatggtgagaacatccaacaattgtgtcctggttgccatgtggaagtactctctcaagatagtggtataaggggatgttggtttagatgtttgattctgaagaggcataaagataaaatcaaggtgcgctacctagaacttcaggatgctgatgagactggaaacttggaggagtgggttatgctaacacgagttgccaaacctgatcaactgggtgtacgtttccttggaaggccaatggttcgtccacagcgcgtggaacaaagcaaggcctcatgctttgatgttggagcca

SEQ ID NO: 5531 - DNA, 307 bp, Zea mays
  misc_feature: Incyte ID No: 700357135H1
ggggcggagaagagaaagacgacccacagctgattgatggtgtagcaatcgtactagacgagatgagcatgcctaggagtacttatgcattcacaaaacggatccacggcgattgtggagcggttgacataacggtatcacgccttgactttgcagttgaggcgacgatacaacttcacgtatctgaagtagagggcagcttcagtttgcgtgcgggctgttttaccagtgggttatgtgaagaaatccagatctttaagggcaccatagtgagccgcgtgcctgaggagatgtgttgttgctgcag

SEQ ID NO: 5532 - DNA, 294 bp, Zea mays
  misc_feature: Incyte ID No: 700357137H1
  unsure 10, 50, 126: a, t, c, g, or other
accgcaagcnccaagtcgagctcaagctgctcgtgctcaggaacgcgctncgaggagcacggctacaccgaagacgagatccaggagcgcgttgcagaggcgcgcaaggccgcggaggaggtaggnatcggtcgtggcgccgggcgatcgcctctgcccggcagaggatatggatctgttggcgtcatttaggtttcagattgccgcagattgttctagcaagacctagatgtagtggcttctatattagtatgggagtcttctagtacttaaagagcaatcccatattcgaat

SEQ ID NO: 5533 - DNA, 300 bp, Zea mays
  misc_feature: Incyte ID No: 700357139H1
  unsure 35, 233: a, t, c, g, or other
gggatccatctccgttgagtcgaggcggctccaantccggctcgtggccacgcggaccaacatggccgcccctttcgccctcgccggtggaggctaccctaccgcctgaggccgcggctgccgccgaggaagaccagtgggatgctgacggatatgttattcctaatttgcccactcaagataatgatgtggctgagcctagtgtccccaaagaaaaagatcctgagcctctnacaggcaagcgatgagaaaatatatctgggacctcatggagctccaccatctcaagcaaagcagcag

SEQ ID NO: 5534 - DNA, 305 bp, Zea mays
  misc_feature: Incyte ID No: 700357140H1
gttcaccgacctcaccgaggaggagttcaaggacacatatcttatgaagctcgacgagcagccccctgcagctgaggccatgggaccgaccgtcggcaccatgagcacagcaggcatgtccaacggcaacaacaccggcgaggctcccaacagtgtggactggaggaccaagggagcagtgacgcgggtcaaggaccagcaacaatgtggctcttgctgggcgtttgcaacggtggcgtccatcgaaggtgtgcaccagataaagacaggtcgtctggtgtcgtgtcggagcaagagatcgtgga

SEQ ID NO: 5535 - DNA, 99 bp, Zea mays
  misc_feature: Incyte ID No: 700357142H1
  unsure 7, 9: a, t, c, g, or other
ccgcaancnaccatccaagacatcagctgcaggggatccgagaccatgcagctgatgtcttggatggtagcttgtggttacgttagaattccagatctg

SEQ ID NO: 5536 - DNA, 332 bp, Zea mays
  misc_feature: Incyte ID No: 700357150H1
  unsure 307: a, t, c, g, or other
aggggcgcgagttaaactagtggcgccgccatttccgtagtgagaacagggagagagagaaagaaccgagctgtgccatcgccggtgggctcgtcgtggtcgctgccccagtgtcgtgccgtgaagctccacccgtgcgtggagaattattgtggcctcgtcacgattgaaccggcgcccggggctcaggatttcttcaccggagactgtgaacccactgtcctccatggccagcctccctgcagactccttctctgacgagcacgccactgtgagatctgaggttcaacaagtagagatagctgancaggagctcattgaaagagaagaac

SEQ ID NO: 5537 - DNA, 162 bp, Zea mays
  misc_feature: Incyte ID No: 700357151H1
  unsure 155: a, t, c, g, or other
tcatctcgccgagaggtgacgggaccgaggaactcgccgagttctaagatagagaatcgcttttcacagcctggggtctgctgcgtagggtggtgttgaaggggagaagtttaagatctgttccacagatcacgcgtgcgcgctcgcgaatcgcnggttcca

SEQ ID NO: 5538 - DNA, 320 bp, Zea mays
  misc_feature: Incyte ID No: 700357152H1
gcgatgggcgcctccgagagctgcgaggacgcgtggaagggcgaggaggatgtccccgtcgccgcgcacgacagggagtacgggcggatggcgcacatcgccttcggattcacacaccacgccgccgccgccgcatgaatcatcatgtcatatgcatgcatcgcttctcttccttgtcgcattaattttcatgcgtccaatgattcatatctctatatgcatatctctctgctctgccttgttggctggctcttctcatcatccctagcagatcgcatagtattagttgcatgcatatatgatgatgcaggtattcgtcg

SEQ ID NO: 5539 - DNA, 322 bp, Zea mays
  misc_feature: Incyte ID No: 700357154H1
  unsure 317: a, t, c, g, or other
agctggtgcatatgagcgtgatgctgggggctatggtggttctagctatggtcgtagttatgactcttcctgggctaatactggtgatgggtttggcaccggtggactctatggtgctaggacaggctatggtggcagtggcggcagtggtgctgctggtcgttaccatccatatggaagatagaaaatctccagtgctgctgtttgctagagaagcttgcagaagatgaattctagatgtgtgctcaagagatcatctgcatctaaaagatgcactgaagttcaatatgctcagtttctgtattaggaagtactgntagat

SEQ ID NO: 5540 - DNA, 322 bp, Zea mays
  misc_feature: Incyte ID No: 700357155H1
  unsure 143: a, t, c, g, or other
gtggctttgcatctgcaaccccgcccgatcaatcttcctcgttccgccgctccctgcgcctccggcagcgaggtgaggccaccgatcggaccttccctagcggcggcgcctaccaacctcaaggagcgatggctctgtctgcnacgctacggatttctcttagcgtcgcgttctttggggttctggcgttcgtgcttggtgtcatcgccgaaaacaaaaagcctgcttccgggactcctatcctaggaaaggatgtcgtcatctgcacgtttccaagtgatccgactcttgcgatggggagcctgtccatgtggcattgtgg

SEQ ID NO: 5541 - DNA, 320 bp, Zea mays
  misc_feature: Incyte ID No: 700357157H1
atattttgtcaatgttggagtcgactgtgggttaaccatcgctggtttctactacgtctgcttttcttgcagcgatggctccattaatggattttattatgatccaaatagcagtccatttcagaagctcgagctgaagtgtaccaatgagaagaaatccgggttcaccttttcatcctacgagctgcagtgacaggacagatgccctcgacagacaactttctgttagcatatagtgtgtgtactgaactcgtactccctaatgaaaggaatgagtggtcgtttacgtaacagtttgttttctagcaagactaagcaaa

SEQ ID NO: 5542 - DNA, 321 bp, Zea mays
  misc_feature: Incyte ID No: 700357158H1
ctggaatatgcatcccttcaagcagtcctgtttgggccatttgttcttgctggcctatccactggtgactgggatgcaaaagctggcaacggcagtgctatttcagattggatcgccgctgtccctccagcacacaactcacagctggtaaccttcacacaagtatccaacggaaaggcatttgtcctctcaagtgcaaatggcaccctgacgatgcaagagcgacctgaagtcgacggcaccgacgccgccatccatgcgacattcagggctcaccctcaggaggactcaacagagctgcatgacatctacagcacaacc

SEQ ID NO: 5543 - DNA, 319 bp, Zea mays
  misc_feature: Incyte ID No: 700357160H1
  unsure 221: a, t, c, g, or other
catctaccagcgactcagcgagcgagagcagcacacacgcagctagctaggagcagcagcagagcagcggcgatggcggcctccatgatctcctcgtcagctctggcggtggcgcctcagggcctgccgcccctcggccgccgcgcctcctccttcgccgtcgtctgctccaagaagaagatcaagaccgacaagccctacgggattgggggtggcctgancgtcgacgtcgacgccaacgggagaaagggcaagggcaagggcgtgtaccagttcgtcgacaagtacggcgcgaacgtcgacggatacagcccaatct

SEQ ID NO: 5544 - DNA, 318 bp, Zea mays
  misc_feature: Incyte ID No: 700357161H1
ggctatccagaatctgagctcctacaaggataagaaatttgtggacattagcaaggaagatttggatttaggtgataacaatgaggaaagagagaaggagataaagcaggagttcagccaagcctgtgactggataaagaatcgcttgggtgacaaggttgcacgtgttgacatatctaatcgtctcaggtcatcgccatgtgttcttgttgcagcgaatttggttggtcagccaatatggaaaggctgatgagagcacagtctatgggtgatacagcctctttggatttcatgcgttcgaggaaagtttttgaaata

SEQ ID NO: 5545 - DNA, 324 bp, Zea mays
  misc_feature: Incyte ID No: 700357164H1
  unsure 23: a, t, c, g, or other
gctgacgacaccaccgtgtggtncgacaaaataaaaaggagagagagagagatggctctgtcgtctcgccgtatggccgccgcaccattcttcgtcgtcgtccttctcgtcctcgtggcggcagagaggacgatgggcagggtggtggtggaagagacgctctgcttgtcgcagagccatgccttcaaaggcgtgtgcctcagcaacaccaactgcgacaacgtatgcaagacggagaagttcacaggcggcgagtgcaagatggacggcgtcatgcgcaagtgctactgcaagaagtctgctagggcatgaccggcagcaagc

SEQ ID NO: 5546 - DNA, 317 bp, Zea mays
  misc_feature: Incyte ID No: 700357171H1
  unsure 273: a, t, c, g, or other
gaaacaccggagagcgccgagatgagagagatgggggaccggccgtagcagggctcgaccttgtcgtcgtcccgttccgggcatgcgcccgctcgtgggagccacaccaacgttgaaccaaagcggtgaggtcacgagaatctgaagaccaacttggtacctgggatctcaagtctaaggcaagttgtgcccttgatcacttttctttacctaataatgttcctgttaaccactgtgacatgctcaggttaatttgatggaacccaataggtntccctagcattatttattccctaccttgcaaacaaaggcactat

SEQ ID NO: 5547 - DNA, 317 bp, Zea mays
  misc_feature: Incyte ID No: 700357172H1
  unsure 43, 69-105, 130, 141, 157, 159, 180, 183, 198, 207, 233, 246, 254, 273,: a, t, c, g, or other
accactcgttcgttccaaacggagaagaggatcaggttcgttnccaagggaaaggagaagagggtcagnnnnnnnnnnnnnnnnnnnnnnnnnnnnnnnnnnnnncccttgctcgttcgttcaccaacanagctccgatcnatccgcaaggcaggcnanatgtacaacgcgccgtcggcncangagatgtcctacttngagcacgtncagaggcgccacgaggagaagggctncctctacgcctgnatcttcantgcgctgtgctgcttctgntgctacgagacctgngagtnctgctcgactgnctctgctgctgc

SEQ ID NO: 5548 - DNA, 300 bp, Zea mays
  misc_feature: Incyte ID No: 700357173H1
  unsure 273: a, t, c, g, or other
gtccccaaccccttcatgcccggcgcggccactccctgaacacgtacccgcgctggcgaaggtggctctcggtcgatctgatcgtcgcgcgccgccgcccgccctgaacgaataatactactagctactactcgctctgctacgtattagctagccgtgcttgcctgctgcatgtacgcatgtcttcgtgtggcctgtcccacgtctctcttctagtctctgtgcactttacgctccagtgaagttactgaagtgtgcgcgcgcgatgcgtanagatcttttgggccggtagttgttgct

SEQ ID NO: 5549 - DNA, 308 bp, Zea mays
  misc_feature: Incyte ID No: 700357174H1
catttggcttcatgtctcctgcatcgagaggaatgttgttgacagggatgatagtcttttatatgttacttggaattgtgtctgggtatgctgctgtcaggctctggaggactttaaaaggaacgtccgagggatggaggtctgtctcctggtcaactgcttgtttcttccctggcattgtcttcattgtcctcactgtgttaaacttcatgctgtggacaagaaatagtactggagcccttcccatctcacttttctttggcctttgtcctgtggttctgtgtctccgtgccacttaccctttaggt

SEQ ID NO: 5550 - DNA, 317 bp, Zea mays
  misc_feature: Incyte ID No: 700357180H1
gaagaaggggcctgtttttactgatcctaagttgaaatggtatgagccccaatccttcttactcggatcagaatactttcttcatgcatatgggccaatttatgctttatcagctgacgtggtggctagcttggttgctttgaggaacaacagtttccgtatgtttagcaacgaggacgttacaattggatcgtggatgcttgctatgaacgtcaaccatgagaacacacatgcgctctgtgaacctgactgcacggagtcttcagttgctgtttgggacattccaaaatgctcagggctatgccacccagaggtaa

SEQ ID NO: 5551 - DNA, 313 bp, Zea mays
  misc_feature: Incyte ID No: 700357183H1
  unsure 275: a, t, c, g, or other
acgagaagcatgctgatgctgggactgacatcgaggaagaagaggaggacgaagatggccacaagcgtgtcgtcgttcttgggccccaagtccccctcaaggaacagctcgagcttgacaaggatgatgagagcctgaggaggtggaaggagcaactcctcgggcaagtcgacaccgagcagctcggagagactgcggagccggaagtgaaggtgctcaacctgaccatcctgtcaccggggcggccagatctagtgctaccgatcccgttcgangccgacgacaagggctatgcgtttacgctcaaggatgg

SEQ ID NO: 5552 - DNA, 309 bp, Zea mays
  misc_feature: Incyte ID No: 700357184H1
ggaagatggaggaagggttattgattgatacatcccgtgcacttggtggcaccatccgggcgattgcagctgactcgaggcttttagtgagtggaggaactaatgcctatattcagtgttggagggccgttgaaggcaatggtcaattatttcacatctctggaagtggtaccgaccagaatgcggagtttcgcctctggggtcatgaaggtcctgtgacttgtcttgccctggattcactgaggatttatagtggttcttgggacatgactgttcgtgtttgggacagagaccagatggagtgtgtgc

SEQ ID NO: 5553 - DNA, 307 bp, Zea mays
  misc_feature: Incyte ID No: 700357186H1
gcaagctcacgctgcccaggaggcgtacgaggaggacgacgagatgccgggcggagccagagagtgcagtgcgcgcaacagtaagcagactatcatcaaggcaattgggaggggtggtgcccttaaagcatgggagtgatctctggttttgctgtcgccgagctgggaaataggaagctgaatcgacctcgcaagcggggaatgtatccttttttgctgcaacataaaaaatgctacccaggcatagctgggtaccttttaacttctgtttgtgggatttgctagagtgatggtttcgatatatagg

SEQ ID NO: 5554 - DNA, 306 bp, Zea mays
  misc_feature: Incyte ID No: 700357188H1
  unsure 191: a, t, c, g, or other
attttctccaaatgaagaaattgagctatatgaggaaattaagtttgagccaaatgtgatgtgcgaacatattgacaagaaacttactttccgttctagtcagcttgaagatggagacatcatctgtttccaaaaggctcctgttccagatggtgatccacaagtgcgctatccagatgtcccttcattcntggagtatgttcacaataggcaggttgtgcactttcggtctctggacaaaccaaaggatgatgatttttctttggaattgtcaaagcttcatacttatgatgatgttgttgagag

SEQ ID NO: 5555 - DNA, 304 bp, Zea mays
  misc_feature: Incyte ID No: 700357189H1
  unsure 301: a, t, c, g, or other
ctcgcctctctctcgcgcaagccacagtagagcaaccaaccataccaccggcccgtgtcgatctctggcctctctcgtgcaaggaattaagcaggcaagaggccaaccttcttccagcatggccaaggcgagcagcaggctgctcttctcgctctcgctcgtcgtcctgctgctcctcgtggagaccactacttctccccatggacaggctgacgccatcgactgcggcgcgagtgcttcgtaccggtgcagcaagtcgggacggcccaagatgtgctgagggcgtgcggcactgctgcancgc

SEQ ID NO: 5556 - DNA, 309 bp, Zea mays
  misc_feature: Incyte ID No: 700357190H1
ctcatggcgcacatccactccacgctacagaagaaggagaagaggctcaaggacctccttcaggaccggcaactgcattcgtgaagaagttcaagaagcccaaggaggacaggtcgaaccagaacctcttcttctcgcaggtggacatgaagctggtggcgagggtgctgaggatgccgaggattcaccagcgagcagcttcagtggtgcaaggccaagctcgacaagatacgtcctggtagataggaagatccacagggaggcttcatttttgttgttcccctgttgagagagtactatatatactta

SEQ ID NO: 5557 - DNA, 300 bp, Zea mays
  misc_feature: Incyte ID No: 700357193H1
  unsure 120, 123, 125-126, 132, 179, 215, 233, 278, 280: a, t, c, g, or other
gggaggagatgcggcgtcccgtgcacgccttaaaaacgagatccctggggtcaccactggtcaactgcgtcactgcgccgaatcactagaaaccccaacaaacggaatttcacacatcangcnannggaaancgcaccgcagtaagatcaaagaggaggcgatggctggcggcgggcangcggcgatttcgttcatgacgcggatggcgaaggtngcggcggggttgggcgtngcggcgtccgcagcctccagtccttctacacggtggacggcgganancgcgccgtcatcttcgatcg

SEQ ID NO: 5558 - DNA, 305 bp, Zea mays
  misc_feature: Incyte ID No: 700357194H1
  unsure 302: a, t, c, g, or other
ggagcatgctcaagggaggcatgaccgcttactcttcgggacccgcagagatctactttgagagccacgcaccagttgacatctgggtggacagtgtctcgctgcagcccttcaccttcgacgagtgggacggtcacacccgccgctccgccgacaaggtccgccggcgaaccgtgaaggtggtcgccatgggcgccaacgacaagccgatggcgcatgccaacgtgagcatcgagctcctccgcctcggcttcccgttcggcaacgcggtcaccaaggagatcctcggctcccggcatacnaga

SEQ ID NO: 5559 - DNA, 311 bp, Zea mays
  misc_feature: Incyte ID No: 700357196H1
ggcggtctttgagaaggtgacagaatctcctggaagggtttacatcttgaagtttaagcaagacagcagaaaattcttcttctggatgcaggaaccaaatgctgatggggactcccagacttgcatgcaagttaatgcctacataaaatcgatccattagatgctgagggctgatcttcgagtacctattgaagcagaaatgtctgaagatacggctgatgatgatatctcttccagagctgggaatctagttgagagcatgaccgctgatttggctggtgaatgacgtctgctgctggacctgtacgctt

SEQ ID NO: 5560 - DNA, 209 bp, Zea mays
  misc_feature: Incyte ID No: 700357402H1
  unsure 56: a, t, c, g, or other
aacctttctccctcctccacctttctccttttcttgccacggcaaaacaccttcgncggcgagagcatggcgatggcgtaccgtgtcctggaggtcaccctggtgtcggcaaatgactcaagaaagtgtcgctcttctcccggactcgcatctacgccgtggcttccatctccggattcgactccgcatcccttcccacagcacccaag

SEQ ID NO: 5561 - DNA, 234 bp, Zea mays
  misc_feature: Incyte ID No: 700357403H1
  unsure 67: a, t, c, g, or other
attggcaggtggttcaggtgccaaatcacaatatactgatacagctgcaaagatagctgctataaanaataagttgaaatctctggaggatgggggatgtagcacaaaaaaaccaagacttaatccagacaacttgacagaaatcagggaacagtctcataagaagttttgaagcgaggattttttttcgttctctggaacattgagtgctttgccctctcatactggtgacac

SEQ ID NO: 5562 - DNA, 103 bp, Zea mays
  misc_feature: Incyte ID No: 700357406H1
  unsure 99: a, t, c, g, or other
aagtaccatgctttccttgcatctgaggctatcattaagcaaattcctcgtcttcttggtcctggtcttaacaaggcaggaaaattccctaaccttggngaaa

SEQ ID NO: 5563 - DNA, 297 bp, Zea mays
  misc_feature: Incyte ID No: 700357407H1
  unsure 75-95: a, t, c, g, or other
cgtctcgccctcggcttcttcctcccctccctgaccgctgccgcgacctctcggcgaaaccctaacctaccttannnnnnnnnnnnnnnnnnnnncaagggagagagagacttgcacatcaaagggcgtccgatggggaagaagaagaagcgcgtcgataaggtcttctgctactactgcgaccgcgagttcgacgacgagaagatcctcgtccagcaccagaaggccaagcattcaagtgccacgtatgccacaagaagctctccaccgcctctggcatggccatacacgtcctcc

SEQ ID NO: 5564 - DNA, 185 bp, Zea mays
  misc_feature: Incyte ID No: 700357409H1
  unsure 25, 27, 97, 99: a, t, c, g, or other
ctgagaagtacaagtctgaggatgngnagccacaagaagaaggtggaggccaagaactcgctggagaactactcctacaacatgcgcaacacgatcnancaccgagaagattgcgtccaagctgccggccgatgacaagaagaagatcgaggacgccatcgacgcggccatcagctggctggacg

SEQ ID NO: 5565 - DNA, 298 bp, Zea mays
  misc_feature: Incyte ID No: 700357410H1
tccttctggacgagaatttcgaggctaaggtcgcggatttcggacttgccaagctgaccacagacaccaacacgcacgtactccacgcgtgtcatgggaactttcgggtatttggccccggagtacgcgtcgagcggcaagctcaccgacaagtcggacgtgttctccttcggcgtcatgctcctggagcggatgtgctcctctgccgcggcggccgtccgccactcagccaagcggcggcccaagatgaaacagatcgtccgtgctctggaagggacgcgtcgctggacgacctgaa

SEQ ID NO: 5566 - DNA, 166 bp, Zea mays
  misc_feature: Incyte ID No: 700357411H1
  unsure 123, 125: a, t, c, g, or other
aaatggggagtgcctatctgcccaaatgacaaagatatggcgccaccaagtaatatagttctttttggcccttttttcgtctacattcgaagaaatcataatgaatgttgacatacatacaantnacattcataaattaattaatggatgcatgtttaatctaaaa

SEQ ID NO: 5567 - DNA, 223 bp, Zea mays
  misc_feature: Incyte ID No: 700357412H1
  unsure 17, 22, 36, 60, 123-124, 194: a, t, c, g, or other
cacatctccatgtccanctgcnaggacggcctcatncgacgtcgtgcagagctccacggngatcaccatctccaactgccacttgcaccaaccacaacgacgtacatgctcttcggcgccagnnactcctggccgcagaccagatcatgcagatcaccgtcgccttcaaccacttcggcaggggcctggtgcancggatgccaaggtgccgctggggcttctt

SEQ ID NO: 5568 - DNA, 298 bp, Zea mays
  misc_feature: Incyte ID No: 700357413H1
  unsure 18, 26, 235, 271: a, t, c, g, or other
ggagaggtcgtttgctgngagccacncacgccgatctgcgcctccaagcccttcttccagggcctcgtggactacatcatctctggccctgtggtggccatggtctgggagggcaagagcgtcgtcacaactggccgcaagatcattggcgccaccaaccccctggcttctgagcccggcaccatccgtggcgactttgctgtcgacattggcaggaatgtcattcatggaattnacagcattgagagtgctaataaggagattgccctgnggttccccgagggccctgctgattgga

SEQ ID NO: 5569 - DNA, 298 bp, Zea mays
  misc_feature: Incyte ID No: 700357415H1
  unsure 2, 9, 92: a, t, c, g, or other
ancaaccanatgagctggtcaaacacgtctaatctgatgggcatgaactcaactggcagctatttgaatcagggcagtgcagctctaggttntggaaatccaattggaggattgagcactggcctctccaatccaagcagttccagtacaggcctgagcatgatgcaaccaaaatctgattttggatcactgtccatgtgcggccaataatgccgcaaatggcccacccagacttgcccctcctccatctacttcagttggaagagggcgtggtagaaatcaaggacaatcagcactc

SEQ ID NO: 5570 - DNA, 105 bp, Zea mays
  misc_feature: Incyte ID No: 700357416H1
  unsure 23, 69: a, t, c, g, or other
tgtttctgaaataagacgcgtancagcatcagtttgctccacttggaatcatttggccatgcttcactnctatccttcgctagcctctatgaccggacctaaact

SEQ ID NO: 5571 - DNA, 296 bp, Zea mays
  misc_feature: Incyte ID No: 700357419H1
  unsure 61: a, t, c, g, or other
gacacggcctacttactgctctatgtggatgacattgtactcactgcctcctctgctggangccctcaagtacatcattgaagctctccaacgtgaatttgccatgatggacatgggtcagctacatcactttctgggaatttctgtgacacactctgcagatggcctgttcctttctcagcggcagtacagtcaggatattttggagcgcaccgggatgagtgcgtgcaagccgtgcagcacgcctgttgatctacactccaaactatctgctgatggaccacatgttgtgacgc

SEQ ID NO: 5572 - DNA, 231 bp, Zea mays
  misc_feature: Incyte ID No: 700357420H1
  unsure 63, 124, 216-217: a, t, c, g, or other
ctcgtctcccaggtcatggcaaaagctggagcaccgggaaaaatagcaagtgggagataaacnggaagagctacgtgaatacttggagaaaaaggtcccccacaccccccacgcaggtgaatancacaagtagcagtacaaggaagagagccaatctgcccgtgactgcgagtgaattgctagggtgtggtggttagttgaggtcacgatgatggnnaggcgggctgatga

SEQ ID NO: 5573 - DNA, 106 bp, Zea mays
  misc_feature: Incyte ID No: 700357421H1
  unsure 50: a, t, c, g, or other
caatcttttaagacatgcataagattcatagtgccatgaggctaaacatnctgagcacttggtgttttcagattatctcccggaaaatccataagtgcagggaagg

SEQ ID NO: 5574 - DNA, 178 bp, Zea mays
  misc_feature: Incyte ID No: 700357422H1
  unsure 81: a, t, c, g, or other
gcattcgaccccaaggagaaagtatggacaaggttccctccggaaggctcgaaatacactcctccacacagttcgtgcgancttcagatggaaggactactgcccgcaagtattccggacgttgcgcaagtcgttcaaggtcgatgccgcggactacatgctgtctctctgtggagac

SEQ ID NO: 5575 - DNA, 294 bp, Zea mays
  misc_feature: Incyte ID No: 700357426H1
  unsure 69: a, t, c, g, or other
ctcatggattcacgtactccggccatccggttgcctgtgctgtggccattgaagctctgaaactttatncgcgaaagggacattcccggccatgtcaagcaaatcgccccaaagttccaggacgggattagggcgctggcagacagtccgattataggggagatacgtggcttggggatgattatggggaccgaattcacaaacaacaagtcaccgactgatctgttccctgccgaatggggggttggtgccatcttcggcgaagagtgccagaagcgcggcatgctggtcagg

SEQ ID NO: 5576 - DNA, 293 bp, Zea mays
  misc_feature: Incyte ID No: 700357428H1
  unsure 28: a, t, c, g, or other
aaactgacaaggacgatatggtgcgtanctcgtcgcgctgatcctacgtcgccacggccgtagccgccgtggccacagccgcaccctcgccggggtttgtacgtcaccggccgcgtctactgcgacaactgccgcgccgggttcgagaccaacgtctcccacgccatcgaaggcgcgacggtggagatggagtgccgtcacttcgagtcgcaggaggtccacgacaaggcggaggcgacgacggacgccggcgggtggtacagatggagatcagcggtgaccaccaggacgag

SEQ ID NO: 5577 - DNA, 176 bp, Zea mays
  misc_feature: Incyte ID No: 700357430H1
aagcatcggcagcatgtcggaggggactgccaactgcgtggacatcctgatcgccatcatcctgcctccgctgggggtgttcctcaagtacgggtgcggccacgagttctggatctgcctcctcctcaccttcctcggctaatccccggcatcatctacgccatctacgccatcac

SEQ ID NO: 5578 - DNA, 101 bp, Zea mays
  misc_feature: Incyte ID No: 700357432H1
  unsure 46, 78: a, t, c, g, or other
gctgaagcctgaaatgtcaggcaagagctaatgagtttagggtgancagaggcagcaattttgctggtcgtttttccncgtatgttgcggaaaagaaactg

SEQ ID NO: 5579 - DNA, 288 bp, Zea mays
  misc_feature: Incyte ID No: 700357434H1
  unsure 36, 59, 157, 216: a, t, c, g, or other
ctgggttgaaggtgctgaagttgcacatcgaaggancctagtttgaacactgaagtganaaaaccatcccaagagctggcaccacctcccctcaagagtgggatatcgatggttcatgttgggttaacggccggtgtagtcgctctcagtggcgcanagtgatggtttacttgaaacgatctcaactgtgatttcgaaaatcggaggatgtttttnaggagcttgattatctgaaacaagcatgccatcagctaatgcatctgaagctttgcctcatcggtgccatta

SEQ ID NO: 5580 - DNA, 97 bp, Zea mays
  misc_feature: Incyte ID No: 700357436H1
  unsure 10, 31, 33, 68-70, 86, 93: a, t, c, g, or other
agttgctgcnattgctgtatctgaagaatgncncaggccaaggtcaaggagacaaattacttgattannnctgagaagaaggcttngtccctnggac

SEQ ID NO: 5581 - DNA, 199 bp, Zea mays
  misc_feature: Incyte ID No: 700357437H1
  unsure 7-8, 113-114, 194: a, t, c, g, or other
ggcaggnncagcggcctccgcgccatcctcgtcatctcggtcgggacaatcatgcctatagcattgactggccttttaatcttcatgttctttctgctaattgccactgctanngcgatcatcgtctcagccctgatgtcactggccgctgctggtcggattcttggctatcttctttgcttgcttggttgcangtaat

SEQ ID NO: 5582 - DNA, 286 bp, Zea mays
  misc_feature: Incyte ID No: 700357438H1
  unsure 125: a, t, c, g, or other
cttacaagatgttgcatacttgtatagcttataaagaagacattgaaacatatgctgatgcagatttaaactataaatgggaacctacagctgaagagtgggatttgtttattgcaattgaaccncttcttgcatctttagctaaagttaccactgcattgtctgcttctcatatcctactgcgaatgctattctatcctcacattgtggatataaaaattgcattgagggcagcaatggtctccaataatttgaacttgagaacaatgggtaatgctatgatgga

SEQ ID NO: 5583 - DNA, 223 bp, Zea mays
  misc_feature: Incyte ID No: 700357440H1
  unsure 2, 22, 41, 122, 137, 177: a, t, c, g, or other
gnaaggaaagggaacgggaggnagaagagaggagggaagangaagaagagcgggccaggaaggagcgggagaaacagcggaggagagagaaagaggaggaggagcgtgcacggagacgcgangaggagaggcagcgngaggaggaagaaagagagagggaagaggaagaagaacggncgagggaggaggaagaaggtggaggcggactggtgacgagccagag

SEQ ID NO: 5584 - DNA, 289 bp, Zea mays
  misc_feature: Incyte ID No: 700357443H1
  unsure 115: a, t, c, g, or other
cgcttcgtgagaacttcactaaggatccatggttctgcagcagacgaccagacagctcttgtgaagacgatgctgacattgagtacgacagcagccgcatctgggttttggacangcccaacataccaaagcctccaccagagacggagaggctagtggttatgaggggcgactacagcaaaatggacacatattatgtcatgcccaatgggaagcgtgcaaggtgtgctggtgatgtggataagtttctggaggcaaatccggagtacaaagaccgcatatctgcttc

SEQ ID NO: 5585 - DNA, 224 bp, Zea mays
  misc_feature: Incyte ID No: 700357444H1
  unsure 108: a, t, c, g, or other
atcatgccaagacaaacatgttgatagaagatactgcatggcaacctgtttggcaaaaggaaattgaatcatcaccttttctaaggaaggcaattatttttggctatngccctatcaggccatggatgtctattgctcactggttgatttggcactttgatctaaaaaaattcagaccaaatgaagttccaagggttaagataagcttagcatgtgtgtttgca

SEQ ID NO: 5586 - DNA, 149 bp, Zea mays
  misc_feature: Incyte ID No: 700357445H1
  unsure 32, 40, 65, 82, 86, 131: a, t, c, g, or other
gtcgcgtgtctaggtttcctctctcaccatancgcccgcncctgtcgcccttcgttcacctctcnttcctctcctccctgcntgcnagggagaggggaagtcagaggcacggagtggcgcagagcagacgnagctgaaccattgtagct

SEQ ID NO: 5587 - DNA, 289 bp, Zea mays
  misc_feature: Incyte ID No: 700357446H1
  unsure 79: a, t, c, g, or other
gacagaagtctctcttggcaagaagctgaagttcacttatcttccagagattgaaaagattcacaagaagaaggagaangttgctaaaaaagcaacaaagagaagccatcctccttgacagctgcttgacagtgaatggattgacatctggccgctctcgacgtgaaagaaaacatgtgacttatacttttgatgattatgagcgttcaataaatgaagccataaaaacaataaggaaaaatgagaatgctgttgaggttggcccctccccattatgcaaaggatttat

SEQ ID NO: 5588 - DNA, 96 bp, Zea mays
  misc_feature: Incyte ID No: 700357453H1
  unsure 29, 31, 36: a, t, c, g, or other
gctgcatcagcatcgacggcggcggcgcncngcggnactacgcttcgaggaatcacctagtctcggcgggttctcgttcttggaggccttccataa

SEQ ID NO: 5589 - DNA, 222 bp, Zea mays
  misc_feature: Incyte ID No: 700357454H1
gagaatattggttcagaaatcaagaacatcaaagaattggtttggggtctggatgggaaaattgattcaatggaagctaaacaggacttctcatgtgctggtgtgatgtacctctgccaattcatggagcaaaatggtggaaagcttccggatcgcctggaaggctccaaaatgacgacaaaacgttttggaggccaaaagttcttacagggattgcaactg

SEQ ID NO: 5590 - DNA, 104 bp, Zea mays
  misc_feature: Incyte ID No: 700357455H1
  unsure 7, 11, 14, 17, 28, 30, 52: a, t, c, g, or other
ctttgcnacgnagnaanacgaccaaccnantctggagggacatatggagggntcatgatgtggttcaagtactatgatgatcaagatggctacaatttcttgag

SEQ ID NO: 5591 - DNA, 218 bp, Zea mays
  misc_feature: Incyte ID No: 700357456H1
caagcatccattggttcttatatggatccagtcaagcaagggtcacagaagtacaccaaaaatgttgcttcaatgttgtgcaaatcacctgaagaagtggtcagtgagagacataattcaaagagttatcaaccttcaatggagcagtgtacacagaaatctaaggaatcaaagcaagtagttgatgaccatgttgcggtttctgtatgagaatggat

SEQ ID NO: 5592 - DNA, 187 bp, Zea mays
  misc_feature: Incyte ID No: 700357457H1
  unsure 186: a, t, c, g, or other
ggcttctgttgtgtacttgtgtttggctagggtttgctcgcgtctcctccttcccttggctgctgtcgtgccggtcggcggcgacagcaagggagggagcatgtcgaagaagaacaatcttgccaagaggaagaagcagtacgagttcgacctccaacgggagaaggaggccaaggagaagcaggnc

SEQ ID NO: 5593 - DNA, 165 bp, Zea mays
  misc_feature: Incyte ID No: 700357458H1
  unsure 7-8, 14, 18, 164: a, t, c, g, or other
gcctgcnnctcgcntcanctcctttcttccccgccccttggcttttgcttggttgcatcgggccggtcgagccggagaggaaaagctagctagcagctaccagctctcggccggcggtggtagtctgcctgcagctggggttagttagctgcaagggttggganc

SEQ ID NO: 5594 - DNA, 60 bp, Zea mays
  misc_feature: Incyte ID No: 700357459H1
ccgtaatgccgtgccacagcaggaacatcatgttgtggaccgattcaccacctgcaacct

SEQ ID NO: 5595 - DNA, 220 bp, Zea mays
  misc_feature: Incyte ID No: 700357460H1
  unsure 89, 106, 114: a, t, c, g, or other
cataatccaatcgccgagatcgacctctaccgtctcgagccataggacctcccctccctcttcaacatccgcagtcacaacgccaaggngtagttcttcgcccgtncggtcgangcggtcccagcaacaggaccaaccacgcacacgccgatggggtactggagatccggacggagtagcattcttgctggcccagggtcagcccacttcttgcgcaatt

SEQ ID NO: 5596 - DNA, 223 bp, Zea mays
  misc_feature: Incyte ID No: 700357462H1
  unsure 58-59, 64, 100, 145: a, t, c, g, or other
ggtggacaggaacatcctcccctactgcagcatcgacaggaagcagaagaagacgctnngaganatgtgagcaggagtttcctgcaagccctgccaggcnttctactatgaccagaaggccatcatgtccaacgaggagttcganaacctcaaggaggagctcatgtgggaggggagcagcgtcgtcatgctaaacgaagatgagcaaaagcttttggaagct

SEQ ID NO: 5597 - DNA, 162 bp, Zea mays
  misc_feature: Incyte ID No: 700357466H1
  unsure 33, 65: a, t, c, g, or other
ctagttctagatcgcgacggccagcccaacatngaaatagatgtggcgtgtttctgcttcttganaactcatcttgttatctctctgtaagactgagtgcatgacacgaataatccacgtacacggctgtactaaaaagatgatgaatctgtggtggctaaa

SEQ ID NO: 5598 - DNA, 216 bp, Zea mays
  misc_feature: Incyte ID No: 700357472H1
  unsure 183-184, 193: a, t, c, g, or other
aatattcatcatcttggtgaacgatacaatggtgcgccaaactgctatggttgtcaaatgtttacactgttgatgtactataagaacagcagaggtcgtagctatcgtaggcagattggaaaaggatggtgcgtagtggcaaaagagaggacatcttgcttttgtgctcgcaagaaggatgcnnaggatctgngatgatcagctgctgttttgggt

SEQ ID NO: 5599 - DNA, 227 bp, Zea mays
  misc_feature: Incyte ID No: 700357474H1
cgcaacgtcaggctttgtacggttttagatttagggatgattctgaactccgagcaatatatcaaagaccatccctgtgcaaagcttgaagtaatttttgtgtaactactatgccctaggcttaacgttttccccccgattcttactgaactctgtgtgcgagtttcagttgtactgtaatgtagagtgttatgtgtagcaaagaaactcatgccagtacggatcat

SEQ ID NO: 5600 - DNA, 86 bp, Zea mays
  misc_feature: Incyte ID No: 700357478H1
  unsure 26, 31, 62, 68, 78, 82, 84: a, t, c, g, or other
gctagccgccatattctccacgatcncactncgagcaccaaagcccgagggaaggggagganccgatngcgcgcggtngttntntt

SEQ ID NO: 5601 - DNA, 91 bp, Zea mays
  misc_feature: Incyte ID No: 700357481H1
  unsure 34, 48, 73, 80: a, t, c, g, or other
ctttcctgcagacaatctgtaaatctcgcctagntcgtccgtacggancaccaaggagaagagcaaggggggncgcagangcagaggcttg

SEQ ID NO: 5602 - DNA, 108 bp, Zea mays
  misc_feature: Incyte ID No: 700357484H1
  unsure 17, 22, 46: a, t, c, g, or other
acagttttcatcacacncatgnatgtagcgatggacttgataaatnagtgtaactggagttgacgaggaaggaccgttgctccgccaaaggattccttttcttttggc

SEQ ID NO: 5603 - DNA, 133 bp, Zea mays
  misc_feature: Incyte ID No: 700357489H1
  unsure 15, 70: a, t, c, g, or other
aaccaaacgccaaangccgctgcgctctctctccttctcgtcctgaccccccagagcgagagggaggggnacccagaggagcctgtcgttttgatcggtgtctctctgcccccgttcccgcgaggagagaaca

SEQ ID NO: 5604 - DNA, 166 bp, Zea mays
  misc_feature: Incyte ID No: 700357490H1
  unsure 3, 16, 126, 152, 156: a, t, c, g, or other
ganggacgaggaagangagggcaagatgaagacgaccaaggggggcatggcgatgaaccccaccgacgccttccgcaaggagcagcggaagaaggagctcaagcggaacaaaaaggaaaggaaganggtgcgggaagttggtattttgaaanaggntccagacgct

SEQ ID NO: 5605 - DNA, 208 bp, Zea mays
  misc_feature: Incyte ID No: 700357492H1
  unsure 84: a, t, c, g, or other
caagaaaactggactgattaaggttgatcgagtcctgtactcatcagttgtataccctcacaattatggtttcgttccaaggantcttgtgaagacaatgacccaatggatgtgttagtcctgatgcaggagcctgttgttcctggttcgttcctgcgagcaagagcaatcggccttatgcccatgattgaccagggtgaaaaggatg

SEQ ID NO: 5606 - DNA, 177 bp, Zea mays
  misc_feature: Incyte ID No: 700357493H1
  unsure 62, 83, 118, 146: a, t, c, g, or other
agctccgctacggcttcaacggcatctcccacagggacaccgagacccccctcaagctcgcngagtacttcaacgtcaccganggggtgttcagctacaaccagatgggcgacgtgcnccccgccgttaacgggccactccatgtnatccccaacgtcatcaccgccgagttccgga

SEQ ID NO: 5607 - DNA, 200 bp, Zea mays
  misc_feature: Incyte ID No: 700357496H1
gaaaagtggaaagaaatgagactggtcacccgtctccaatacctagaggatgataaggcagctgtctatctgtgttgcgcttcactaagtgtgattgtaacagtggtacctcttgtgttctgtgttccgcgatgttgcagttggttgcttgatcgaaagatgtttcaaccttacatctgctagctatgatacagatggtc

SEQ ID NO: 5608 - DNA, 308 bp, Zea mays
  misc_feature: Incyte ID No: 700382001H1
  unsure 3, 22, 43, 58, 67, 73, 82, 85-86, 92, 98, 135, 162, 186, 270, 280-281: a, t, c, g, or other
ggnagggccaggatcctattgntgagggtatagaggacaaaantgctgcatggacatncctttccanaagagnagaggtgangcnnatccangttccnaagatataagcatggggagaagtatgaaccacactangattacttcactgacaatgttaacacngtccgtggtggtcatcgctacgcnactgttcttttgtacttaactgatgtaccagaaggaggggaaacggttttccccttggctgaggagcccgatgatgctaaagangcaaccttgnnagaatgtgctcagaaaggcattgcagt

SEQ ID NO: 5609 - DNA, 306 bp, Zea mays
  misc_feature: Incyte ID No: 700382004H1
  unsure 68, 78, 96-97: a, t, c, g, or other
caacatcttagcgaaggaagtgaggagaaggttctacaagaactggtgcaagagcaagaagaaggctntccacaaagnatggctctcaaatatgannatgatgctggcaagaaggaaattgcagctgcagcttgagaagatgaagaaatatgcttctgttatccgtgtcattgctcatacccagattaggaagatgaagggtttgaagcagaagaaggctcacctgatggagattcaggtcatggtggtaccattgctgacaaggtggactatggctacaaattctttgagaaagaggtccctgtt

SEQ ID NO: 5610 - DNA, 300 bp, Zea mays
  misc_feature: Incyte ID No: 700382006H1
  unsure 79, 82, 100: a, t, c, g, or other
tgcacaagctttttatgttcctcaggatgatatgatcaacgcctcaacaaaaacaagttggtaacatattgattggaanaancctggctaaagcattccntcttagtttcaggtttgtgcagcagtcaatatatctgattaataggttctcatcagaaaacaatttcaagcactcgataatttacgatgcctagggggctagactgatattaatcattactttcagtaacttatttatgatattgactgaagaaaaagaaaccctgtgccaccttctttcacatatggaatcagcaaacc

SEQ ID NO: 5611 - DNA, 300 bp, Zea mays
  misc_feature: Incyte ID No: 700382009H1
  unsure 91: a, t, c, g, or other
gtctgggttctatgacctccaattgggctagagatgagtacaggctctcttgtggtgcagcaggcatgaaccgtgatctgttgtggcgatntatggatgtccagaccaggcttatcacccccatttgcccacactatgctgagcacgtgtggcagaagatcatgaagaaagaaggctttgcaataaaagctggctggccagccgcggacaccccggatcccacactgagaattgcaaataaatacctgcaggattccatagttttgatgaggaaactgcttcagaagcaagagtctggtt

SEQ ID NO: 5612 - DNA, 300 bp, Zea mays
  misc_feature: Incyte ID No: 700382010H1
  unsure 9, 22, 94, 113, 136, 139: a, t, c, g, or other
gcaagattnataaatcacagcngccaacctaaccttttcgtccagtgcgtcttgagctcacacaatgatgttaaaactgggcgaaagtgatgcntttcgctggctgacaccanacttcctcttcaggagctatccnatnactacggttatcgattggacagtgttgttgggcctgatggaaaaattgtgaagctggcctgccactgtggtgctcctgattgccggaagcgcctctactaacctgcagtgtgtttcttctatttggattttggaggaaacagcttatattgtaggaaaagc

SEQ ID NO: 5613 - DNA, 299 bp, Zea mays
  misc_feature: Incyte ID No: 700382013H1
  unsure 37, 45, 52, 58-59, 66, 81, 90, 105, 107, 126: a, t, c, g, or other
cgtttccacaacgtcaccgcaccgccgtcatgccgancgtaagcntgaaatngcaganngagctcnttccaggcatagagnttgcccctngccagcctccgattntnttcaagactcagttgtacncactaactggtgtgccacctgaacgccaaaaaattatggtgaagggaggaatattgaaggacgatgcagattggtctactttgggagtgaaagatggccaaaagttgatgatgataggcacggctgatgagattgtgaaagctcggagaaaggtccagtgtttgttgaggatc

SEQ ID NO: 5614 - DNA, 300 bp, Zea mays
  misc_feature: Incyte ID No: 700382015H1
  unsure 66, 86: a, t, c, g, or other
tacttaatgtggttgatgtttcgtatggtggcgagaacggtttcaaccaagctattgaattatctngctgagattctagcaaatgngaaattcattcaagaaaagaagttaattggcaagtattttgaagagatcagtcaggatacgggaaatatgtctttggtgttgatgacactctgaaggctcttgaaatgggtgctgtcgagaccctgattgtgtgggaaaatctggatatcaacagatatgtgatcaagaacagtactactggggaaattattataaaacatctgaacaaagagc

SEQ ID NO: 5615 - DNA, 300 bp, Zea mays
  misc_feature: Incyte ID No: 700382017H1
  unsure 25, 37, 74, 90, 283: a, t, c, g, or other
cccgaggttaaggattctctggttnagaacataaggnggaggatgacaccacagcctctcaagatccgtgctgntatagagatgaaatgncttccagtttgatggagtgctccatattaagcaagctatgaagaaagctgaagctgcgggcaatgataactgtcctgtgaagattaagctagttgctcctccactttatgttttgaccacacagacccttgacaaggatcaaggcatttcagttctcactactgcagtcaaggcttgtacagcagagattganaagtacaaaggaaagtt

SEQ ID NO: 5616 - DNA, 298 bp, Zea mays
  misc_feature: Incyte ID No: 700382018H1
  unsure 28, 45, 64, 74, 89, 91, 109, 122: a, t, c, g, or other
caggtcgctgaaattggaattgatgtcnacaaagtgcttcccatntcattattagattactganataactatgncctagagagtgaagntnagtggaggtggcaccacnaattccttgatgnaccaggaatgtttggattgttgtattctgacattgtttggttcaacatattcaagttggagcgtcaggtctccaacaattaaactaaatggaggagtggagcttcatgttgggatgatgcatgcacctttcaagtttcggaatgttgtgctcaactgcaacttgtggccgttgaac

SEQ ID NO: 5617 - DNA, 300 bp, Zea mays
  misc_feature: Incyte ID No: 700382020H1
  unsure 58, 65, 154-177: a, t, c, g, or other
caaccctcccagctcattttatcccccgctattctagtcgccagacccagatcgctancctccancgtttggagccagaccaggggcggctgcggcggcatttctagggttttgttgaaggtctgagctgtgcaaagagagatggattccaaannnnnnnnnnnnnnnnnnnnnnnnggaaaccaagggaagaatgccgctgatgtcacatccattgctggggaagctgcttctcagaatcacaatcatgagttagccccaatagatcatcataaaggttctgatgcagatgatgtcatg

SEQ ID NO: 5618 - DNA, 298 bp, Zea mays
  misc_feature: Incyte ID No: 700382023H1
  unsure 77, 246: a, t, c, g, or other
aggttttttgattttagccgccgccgctgctcatctcacatccctcgagaagacgcctgctcctcgccgatcgatancgatggccgtcttctccgacctccacaccgccgacggcctcaagtccctcgaggctcacctcgccggcaaaacctatgtgtctggtgactccattactaaggatgacattaaggtcttcgccgcggtgccgtcgaagcctggcgctgagtttcctaatgccgcccgctngtacgagaccgtctctgcggctgtagcctcaagattccctggtaaggctgtt

SEQ ID NO: 5619 - DNA, 297 bp, Zea mays
  misc_feature: Incyte ID No: 700382025H1
  unsure 134: a, t, c, g, or other
caagagtgtatgcagcaagtatggagtttctgggtaccccacaattcaatggtttcccaaaggttccctggagccaaagaagtatgagggtcaacgttctgtggaagcccttgcagaatttgttaacagcgaanaggtaccaatgtcaagatagctgccattccttcaagcgtcgtggttctgacttcagagacctttgactcaattgtccttgatgaaaccaaagatgtccttgttgagttttatgccccatggtgtggtcatgcaagcatcttgctccgatttatgagaagctgg

SEQ ID NO: 5620 - DNA, 299 bp, Zea mays
  misc_feature: Incyte ID No: 700382029H1
  unsure 72: a, t, c, g, or other
gtcacgttattctcctgaaattgttgcaaagacgtcaagtgctgaaaccatagctcttctgcctcttgttgntcttatgcatggaactgaagattattcaataccatcatcttccagtcaaacttttgttgacgtcctccaacaagctggtgctcaagcaaggttactattgtacgaagggaaaacacatacagatatctttgtacaggaccctctaaggggtggaagagatccattggttgaagacgtgttgtctattattcatgctgatgatgcaaatgcatgtcaaaagattgctt

SEQ ID NO: 5621 - DNA, 300 bp, Zea mays
  misc_feature: Incyte ID No: 700382032H1
  unsure 52, 215: a, t, c, g, or other
gcaaacagcttgagcttgccaggacgttccagtttcctactctcaggcagcnacccgcatcgtttcttgcaacgatggaagagtacatcagagaagcaccccgaccctcgatcaagagtgaggagagcgaggagccgaagctactgacctacgagcaagaagctccagaggaacccgaaaatgctgtggaagaggagaaagaagaaccgagtcanaaaccagaacctcagcctgtgcctgatccagaaccccacccacagcaaacgactggagatctactaaacctggaagcagaggtga

SEQ ID NO: 5622 - DNA, 300 bp, Zea mays
  misc_feature: Incyte ID No: 700382033H1
  unsure 17, 20, 36, 44, 62, 92, 97, 103, 108, 113, 163, 166, 170, 174, 208, 231,: a, t, c, g, or other
gtttcccccctctcatntcncctcctcctcccgctncccctggntccccaagccttcgacgntccggctaaggtttttgccctccttccccnccgcngctgtntcagngagcnagaccgaggggtagagaaagagcggtgcttagccacccatgtcgctgcgnccnagcnagcntgtcgaggtacggcggaaccgctacaaggtggcngttgacgcggaggatgggcggtngcggcgcgagganaatatggtggagatccgcaaganccgncgtgagagatcctnctcaaaggcnccttg

SEQ ID NO: 5623 - DNA, 298 bp, Zea mays
  misc_feature: Incyte ID No: 700382034H1
  unsure 15, 77: a, t, c, g, or other
gaaagagccgaccancatgcggagaagtacgtcagaaaaggaggattgaactggccacaaagcaataacaacagtangagagcgttagagctgttctcaaactgcctcgccttcagaacctggtgatgcagcatgtggatcactctgcgggggacttcattgaccttctgaagcgcctcttagcctatgagccctcgggaaggttgactgctcaagaagcgttgggccatgtcttctttaccagataccggcaataacaagtcgcctcgccatgacatcttcgatgattggctatggc

SEQ ID NO: 5624 - DNA, 297 bp, Zea mays
  misc_feature: Incyte ID No: 700382035H1
  unsure 70: a, t, c, g, or other
ccaggacatgatcaatgaggtggatgccgacggcaatggcacgatcgacttccccgagttcctcaacctncatgggccgcaaggatgaaggacaccgactccgaggaggagctcaaggaggcgttcagggtgttcgacaaggaccagaacggcttcatctctgccgcggagtccgccacgtgatgaccaacctaggcgagaagctgaccgacgaggaggtcgacgagatgatccgcgaggccgacgttgatggcgatggccagatcaattacgaggagttcgtcaaggtcatgatgg

SEQ ID NO: 5625 - DNA, 298 bp, Zea mays
  misc_feature: Incyte ID No: 700382036H1
  unsure 52, 65, 70, 77, 88, 90, 92, 109, 210: a, t, c, g, or other
agcgatcccaagaaacgtgcaatctatgatcagctaggagaagaagggctcnaggggcagccgcncccanggagcanggaggttctgngngnattccccttcttccctngcggggctcattccaccgctccccattttaatcacaggagtgcggatgatatatttaaggagttctttggatcccctggcatgggtggcatgagagcgganccaggattccagaggtcaatgtttggcaacgatatcttctcttcagctttggcgctgagggttccacagtatgcagcagccaccacgt

SEQ ID NO: 5626 - DNA, 295 bp, Zea mays
  misc_feature: Incyte ID No: 700382038H1
  unsure 38, 64, 113, 212: a, t, c, g, or other
ccgtcgtgctggactccacgcagggggtactctgcggngtcgccaggggctgcaggtggcagcncctggcggcgtgggaccaacctggtggccttctatgtcatcggcttgcngctacgccatccttttcggattcacgctcgccttccaaaccaaggggctgtggatggggcagatatgcagcctcctctgccagaactacgtcctctttnttatcaccctgtgaaccaactggcaggagttagacctgaccatgttcaacaaggacaacgattttgtgtgctaggaatctaga

SEQ ID NO: 5627 - DNA, 296 bp, Zea mays
  misc_feature: Incyte ID No: 700382041H1
  unsure 2, 9, 24, 118, 290: a, t, c, g, or other
cncttcgtnccggtcaggcgagtnagtcgtcgtgccgccggtgccctgtatccatggcggcggcgttgcgtgccgtcttgagaggcatcaaggagaaggggctcaccaacttcatccncgacgtccgcgacgaaggatacttcaaatgcctctggacgggaaccttttgcaaacgaaaattcacaatattggagcaacacttgtaggagttgacaagtttggaaacaaatactatgagaaactacatgacactcagtacggaaggcataggtgggtagaatatgcagagnaaggtc

SEQ ID NO: 5628 - DNA, 304 bp, Zea mays
  misc_feature: Incyte ID No: 700382042H1
  unsure 20, 25-26, 28-29, 95-96, 117, 165: a, t, c, g, or other
cataaacaaaacccagtccnttgtnncnncccccggcacgcctagcgccagtccagcaaccttccactgccctccctcccgtcgccatggcgcgnnaagaagatccgggagtacgantccaagcgcctcctcagggagcacctcaagcgcctcgcgggcatcganctcaccatcctctccgcccagatcacgcaatcaacggacttcgcagagcttgtgagccagcagccatggctgtccaaccatgaagctagtggtgaagcccgatatgctgttcgggaagcgtgggaagagcggcctcgtg

SEQ ID NO: 5629 - DNA, 294 bp, Zea mays
  misc_feature: Incyte ID No: 700382045H1
  unsure 15, 26, 48, 70, 96, 235: a, t, c, g, or other
gatccgttaggcacncgctctgctgnaccgcaggatgagtcgaggcanctgcggatcgctcgagcaagtngatcctccgtccagggctgggatgcnaagtgcatgcaagttggcggaggccaaacgctgttgctgtcgtacgttcgcttcacttgccgaggtcttcgttcaacgccgcagccgtgaaacgcttgtgattttctttacacaagccgggaaggttgctacgtgcgtngtgggaggcggggaaggtggctacgtggtgggagggcgtggtgacttttcttcatccgc

SEQ ID NO: 5630 - DNA, 296 bp, Zea mays
  misc_feature: Incyte ID No: 700382049H1
  unsure 46, 68, 162, 244: a, t, c, g, or other
cttatcgatctcctcgcacctcgtggcggcacctctccccttcganccaccaagggtttaggatcggnggcgatggcggcgaggctgggacagctgacgcgctcaggcggtgcaggcggcggagttcgcctcgaagcacggcggctcctactacaaggagcncatggagaagaacaagcagtacgtcgtgcagccccccaccatcgagaaatgccaggagctctccaagcagctcttctacacncgcctcgcaagcctaccagtcggttatgagtcattctggaaggagcttgatg

SEQ ID NO: 5631 - DNA, 293 bp, Zea mays
  misc_feature: Incyte ID No: 700382052H1
  unsure 45: a, t, c, g, or other
ctctgcagagcctgggcttcttcgtcgtacgccggcgtccctgcnagtgcctgccgttgaactctccggccaccattgatccgacctcccctaagccatcgatgagtagagaaaaacagtgaacgccacctctgtactcgccccaccttatggcgcgtcgctcctgcagtaccgacccacgctctgcgcggcgctcaggtgttacggctgccctcaaatccgtcgtcggaccattggcactggggcaagcaaaagcacggacaggtgctcggcgtgctgcaacggcttccgat

SEQ ID NO: 5632 - DNA, 290 bp, Zea mays
  misc_feature: Incyte ID No: 700382053H1
  unsure 72, 79, 82, 101, 208: a, t, c, g, or other
atcgactccccgaggctcttacagaaacgctcaactacctgaagcggagatcaactgctgacaagtcctttncatatgnggnattgattgtcgatgatggnagcactgatgggacctctaaagtcgctttcagttttgtaaagaaacacaagattgataatgttagagttcttctacttggaagaaatcatgggaaaggtgaagcagnccgaaaaggaatgcttcattcacgtggtgaactattactcatgcttgatgctgatggtgcaataaagtgaccgatttggaaa

SEQ ID NO: 5633 - DNA, 289 bp, Zea mays
  misc_feature: Incyte ID No: 700382054H1
agaaccagacctcggggtggatcatcggggtcgcggaggtctactggatggggtcaagaagtatccgggcaagtcgtctctgggaaccctgcttattgctcgccggatgctagcgccgccgtggactgcgcggctccgagaagtcgaggtcgtcgcgacatatcccaggaaccttcggacttggaacgaagctgtccataatatggaaagcatgattgggacgaaggtcgaatcaattctgaagctatgcgcaaggaagcttcggctcagtagcagaaaaaggaaccga

SEQ ID NO: 5634 - DNA, 291 bp, Zea mays
  misc_feature: Incyte ID No: 700382055H1
cacatttatctctgacaagaaggcatttggaggtagcacccccaagactgtttctgagaaggagtggtggcaagccacagacaccaagttccaggcctggcctcgcactgctgggccaccggttgtcatgaaccccatcagccgccagaacttcatcgtcaagtccactgagtaggtttgggctggagaagctggttctgcgacttggtgccgccatgaagccagagttccttttctaaggtcttaatcaattgtaataaaacgaaatacagtcaggatttttttgtgatt

SEQ ID NO: 5635 - DNA, 294 bp, Zea mays
  misc_feature: Incyte ID No: 700382056H1
  unsure 3, 134, 162, 177, 184, 225: a, t, c, g, or other
ggnccccatatgccaaattattatgttccggttgtccaacagggccaacagggtccacgcccaggtattaggcgtggagctggagcccagggccagcaacctgtgccaccatttcagcagcagattcttccgcnaggacggatgtaccgttacccaactggncgcaacatgcctgangctccancgatgccaggggttgctggaggtatgattcaggcatatganatgggaggcttccctgtgagagatgctgccttatcaccggccgctcaaattgggatctgacttctgccc

SEQ ID NO: 5636 - DNA, 294 bp, Zea mays
  misc_feature: Incyte ID No: 700382057H1
  unsure 3, 23, 26, 33, 106, 194: a, t, c, g, or other
atnttggtgaagatgagcagatngangcaaganagctgcaagagagaatgcaggttgttcaaaaggatcgggaagaaaaacttgcagagacactgaaaaaccggcnacacatctatgtgcaaggaaataaggcagaattcatccagcatgctgaagcagaggtgtccaaacttagaaatgcagcatatggagtngttatgttgaacactattggctatgtatattcaaggcaagctgcaaaagaacttggaaagaaagtgatgtttttgggtgttccatttattgccgaatggt

SEQ ID NO: 5637 - DNA, 292 bp, Zea mays
  misc_feature: Incyte ID No: 700382060H1
aaccagagctcctgactgttcctctctccctcctcacgggcgggctccgtctgttccgtccatccaccgccccggtcgtctcccggccagatccctctcctgcaaggtttctttgcgagtggccggagaagatgatgggcgggttcctctccagggtcctcctgctggcttttggctatgcctatcctgcctatgaatgctacaagaccgttgaactgaacaaaccacagattgagcagctcatattttggtgtcagtattggatttagttgccctgttgacagttttggag

SEQ ID NO: 5638 - DNA, 296 bp, Zea mays
  misc_feature: Incyte ID No: 700382061H1
  unsure 2, 4, 25, 48, 80, 93, 99, 127, 142, 144, 150, 209, 220, 236, 238, 264,: a, t, c, g, or other
gnancaataagactgacagcgacgntgatgccacagctagcgtagctncgtcgcgctggtcctcgtggccacggccatanccgccgctcccgncgttangtttgtcgtcaccggccgcatctactgngacaactgccgcgcngngttcgngacaaacgtgtcccacgccatccaaggcgcgacggtggagatggagtgccgccacttcnagtcgcagcangtccacgacaaggcgnangcgacgacgggccccggcggctggtnacangatggagatcagcgncgacnaccaggac

SEQ ID NO: 5639 - DNA, 296 bp, Zea mays
  misc_feature: Incyte ID No: 700382063H1
  unsure 169, 184: a, t, c, g, or other
aagaaacaagcgcacaagatcaaatacctcgccgccaataatggcctccaggtcctccatcctgctgcgccatggtgatgctggctgcgctattcgccgttggtttgtgcaccacccccctcaccttccaggtcggcaagggatccaagcctggccacctgatcctcanccccaatgttgccancatatccgacgtggagatcaaagagcacggtggcgatgattctcctttacgctcaaggagggcccgactggcacctggacgctcgacaccaaggccccgctcaagtaccccc

SEQ ID NO: 5640 - DNA, 295 bp, Zea mays
  misc_feature: Incyte ID No: 700382064H1
  unsure 170, 199, 285: a, t, c, g, or other
attgaaatccaagccctattctacatggctttaagatgtgctctccaaatgctcaagccagagggtgaagggaaggatttcatagaaaagatagggcaacggctacatgcactaacttaccacatgaggaattacttctggctagattttcaccagctggataacatatncagatacaaaacagaagagtattcccacncagctgtgaacaagtttaatgtcattccggattccattcctgattgggtgtttggtttcatgccatgtcgaggaggctatttcttngcaacgtcag

SEQ ID NO: 5641 - DNA, 300 bp, Zea mays
  misc_feature: Incyte ID No: 700382067H1
  unsure 73, 88, 197, 265: a, t, c, g, or other
aacgttatcaagctcaaggagatcgtcacctccccaggcccagagcgggacgagcaaggggagccaattgacngtaaacaagtaccanggggagcatttacatggttttcgagtatatggaccatgatctcaccgggcttgctgatcggccaggaatgcggttcactgtgccgcagattaagtgttacatgaggcanctgcttacaggcctgcactattgtcatgtcaaccaattctgcatcgagatatcaaaggatctaacctnttgatagacaatgagggtaattgaagcttgctgat

SEQ ID NO: 5642 - DNA, 307 bp, Zea mays
  misc_feature: Incyte ID No: 700382068H1
  unsure 15, 17, 19, 60, 74, 84, 87, 91, 103, 119, 123, 144, 162, 168, 211, 293,: a, t, c, g, or other
cgcgagactcctgtntntnttcttttctctgtgaatgcaagtggccagtttgtcggactnagctgaaatggtgngtcaggtaangtngganaaaaacaatagnagcattggcaacaggncaantggactggttgtttccctgtnaagtggcacattgtgaangatgtnccaaacagcttgctgaagcacattcattcttgagaacaatganaacaagccagtgacgaacagcagagatacacatgaggtgaagcttgagcaaggccttcaagtgcttaagttttcaaggatcntgtctgcangacat

SEQ ID NO: 5643 - DNA, 305 bp, Zea mays
  misc_feature: Incyte ID No: 700382069H1
  unsure 83, 95, 128, 216: a, t, c, g, or other
ggaaaagagaagttctggagagtttgccttgttgtctcaaaagtctgctgcgatatccacgcagaaaccagtggtggtttacnaaacagactacnctgccagcacctcctcagaataggtttaagctngacaatcggaccacatcattcagaattcttccacctttgccacctgaaattgcaaatgaatctgtcttggcagaccatttctcatcanttggggatctttcgtcggttgtcctggaagatactgaagcccataaccttggatgcaaccctaaaaccttcgctgagttgctcagcttg

SEQ ID NO: 5644 - DNA, 89 bp, Zea mays
  misc_feature: Incyte ID No: 700382071H1
  unsure 8, 13, 33, 64, 73, 77, 81, 85, 88: a, t, c, g, or other
ttcacatnatagnatcagtcgtgtatggagatncaaagatatatttatatacttatgtgaccgncttattganaagnaaangganaang

SEQ ID NO: 5645 - DNA, 300 bp, Zea mays
  misc_feature: Incyte ID No: 700382072H1
  unsure 14, 18, 68, 82, 110, 112, 146: a, t, c, g, or other
ccccactcttcgcntccnttctggagcagctagggttccgtcctcgatccgatccgccgagtgcacancacctttccccacnccgatcgaatcgatggccgccgagggcnanaagaagatgataaccctcaaaagctccgatggcnaggagttcgaggtggaagaggcggtggcgatggagtcgcagaccatccgccacatgatcgaggatgactgcgccgacaacggtatccctcttcctaacgtcaactccaagatcctatccaaggtaatcgagtatgcaacaagcacgtacatgcc

SEQ ID NO: 5646 - DNA, 289 bp, Zea mays
  misc_feature: Incyte ID No: 700382073H1
  unsure 20, 39: a, t, c, g, or other
tgatgctacaggagatgatnatggtgatcctgacttgtnttctattagtgtaatcaagggtggaaaagaacttgaagctgttgaatcagcagaggttgatgtgcaaaatgaaattggagacagtgagaatgaggatactcaagctcatgaacactccgatgaggaaatggattctgatgaggaacagcagaggtatgatgcccagcttgaggagatgctgatgaagcttatgagcgctttgtaactagaaagggtggtgaataaaacaagaacgcaagcgtgcgaaacg

SEQ ID NO: 5647 - DNA, 291 bp, Zea mays
  misc_feature: Incyte ID No: 700382075H1
  unsure 19, 117: a, t, c, g, or other
aagaccttcactcagcganatctgctggagcagccgatctgaggagaacatggctccttcagtggttcagccatcacaattggagccatcctcttagaccgtctccgacagtttacncacccctcttagtcgattgttatttaagtgcagtctcttcggagatgcaattacagtccatcctctctttcttttcccctttctcaaagagctaggaccttgctcgactgagcatcaggctgtagggctctttgtgatcatcttttgccagttttcttcttgtagcagaagttg

SEQ ID NO: 5648 - DNA, 292 bp, Zea mays
  misc_feature: Incyte ID No: 700382076H1
agaagacgacggtggaggtgtgggcgagcctcaagactcgtttcgtcggggcggattgggtcatgacggcgcgcctccccacgctcaagggggagttcgacaagctatgcatggaagatagagagcagttggacgactacgctgacaaaataagcggcatgtcgcgcgttacgtcgggcttggcacgatgctcgacgacgacgccatggtgaagaagctcctcaacaccatcctggatcggctcttcccagccgttgcgggcatcgagcagttctgcaacgtcgagatgatg

SEQ ID NO: 5649 - DNA, 289 bp, Zea mays
  misc_feature: Incyte ID No: 700382077H1
  unsure 20, 51, 56, 103: a, t, c, g, or other
gcctgtgcgagatgagaganattgccgccgggatccgccgccaatgatttntgtgncccgtcgccgttcgggtgcgggagaatggagctaggtgttcgctgtntagtgctgcgggtgatgatggactgttcgggcatggctatcaaccagggtcgtgggaattcgtcgccggtgttcgagatttccgctgtgacaccactgtggcatggtcagagtcacaatcatccagcaatgagcagtgatgtcacgaggattgaagaatcaccctggtaactggaatctcaagtgc

SEQ ID NO: 5650 - DNA, 289 bp, Zea mays
  misc_feature: Incyte ID No: 700382078H1
  unsure 167: a, t, c, g, or other
gaatgatgagaagatcactgagaataaaggcaatgtgagtgaggagcaggccgatgccgttgaggaattgaaagggctgtctgctggggaaactttacaatctgttcccaaggttgataaaagcccttcaaataaagatcaagatataatctcgagggaggatttanaagaagaattcactaaatttggcacagtgcggtatgtggacttcagcattggggaagatctggattcattcggtttgaggatcctgcagcagctgacaaggccctgcattgcagccattgca

SEQ ID NO: 5651 - DNA, 292 bp, Zea mays
  misc_feature: Incyte ID No: 700382079H1
  unsure 143: a, t, c, g, or other
caattggccatgttgctgctacagtgagcatgtctaaggtggcagtgtcattcacacacataattaaaagcgcagaacctgcattcagtgttttggtgtcaaggttcttccttggggagacgtttccaattccagtatatctntctcttcttccaatcattggtggttgtgctctagctgctgtcacagagctgaactttaatatggttggatttatgggtgccatgatatccaaccttgcatttgttttccgcaacatcttctcgaagaggggcatgaaggggaagtccgt

SEQ ID NO: 5652 - DNA, 292 bp, Zea mays
  misc_feature: Incyte ID No: 700382080H1
  unsure 31, 68: a, t, c, g, or other
cccgtcgtcgcgggcatcgagcagttctgcnacgtcgagacgatgccgttcgaggaggcgctcggacntctcaaggcgttcgatgagcgttctcggcggcgtactcatgccggtggtgaacggcgcgacgatcagctcctcctcacggaggccgagtggaaagctcgaaaaaagaagaagtcgacgatcggcaaatgcttcaactgtggcaaccgcggccactttgcacgggactgccccaagccgaagaaggaagaggcatattcgccaatgccgaagaggaggcgacgct

SEQ ID NO: 5653 - DNA, 300 bp, Zea mays
  misc_feature: Incyte ID No: 700382087H1
  unsure 81, 128, 277: a, t, c, g, or other
gtacgaagccctcagtcctccctcacacaccgaaccgagcgcaccatgtcgtcggcggctggaggagtggaggagacggtncgggcgtcgcacatcctcatcaagcacgagggttcccgccgcaaggnctcctggaaggaccctgacggccgcatcatctccgccaccacgcgcggcgacgccgaagcgcgcctcctggacctccgcaaccagattctctccggccaggccaattcgccgacctcgccgctcggcactccgactgctcgtccgcgcnacgcgtggggacttaggtacttt

SEQ ID NO: 5654 - DNA, 290 bp, Zea mays
  misc_feature: Incyte ID No: 700382089H1
  unsure 5, 22, 26, 30, 34, 42, 50, 76, 113, 142, 154, 161, 165, 196, 216, 218,: a, t, c, g, or other
ccgangcctcgagcaacgcgancgcncgcngacncgacggcngcatgganaccgagtccttgcagcaggggagctncctcgtcgtggcacacgacggagcgccgtgtcgtgtngagccgcgcagcagcagaagcgccagggntgccagggttcntccagcnatcnagctggttccagctcaagtacttctctgcanatatcagaaccagaaccccnanaaatccaagaagaagaggattactatatngaggatgttgtnatgatgatttnatggcnacgaagagnatgnt

SEQ ID NO: 5655 - DNA, 292 bp, Zea mays
  misc_feature: Incyte ID No: 700382090H1
  unsure 83, 95, 104, 128, 138, 221, 263: a, t, c, g, or other
gccaacgacgtcggtgcagatgcagagctcacagtcacagttgcagaggctggcgacggtgttgcagtgcggaaccgtctggngcagctgttgangcgccggcngcgctgagcggtgaaccggcgagnagggacatcnacctgctagggatcctgccgccgctcgcggtgttcgccttcttctacttcctcgtcgctcctccggtgatcatgaactggatnaggctgaggtggtacaagcgcgaattcgtggagacgtacctncagttcatgttcacctacctcttctaccc

SEQ ID NO: 5656 - DNA, 293 bp, Zea mays
  misc_feature: Incyte ID No: 700382091H1
  unsure 31, 36, 42, 102, 174, 189: a, t, c, g, or other
gcgaaaaggacaggagccaagaaggaagaancggcngcagcncctggtggtagctgctggaggcagcggcgggaacgttcgacatctccaagcttcggcgcnaccagtcgacggcaagacggactgcacaaaggcagtccaggacgcgtggacgtcagcgtgcgaacgaccggnagcgccacggtggtnatccccaagggcgactacctggtcggccctctcaacttcactgggccatgcaagggcagcagcatcgccatccagctggatggcaacctgctgggatcaaacga

SEQ ID NO: 5657 - DNA, 287 bp, Zea mays
  misc_feature: Incyte ID No: 700382092H1
  unsure 25, 31, 45, 128, 141, 228: a, t, c, g, or other
ctaggaatgggggccaagtcagtcntcccantgacaattggggangtcttccttctgctcatgggatggacaacatttcaagccttgggtcagggaaccttggttcgtggaactggagataataactntggtttgccttcnggtagctatggcaggaacaactcaactggtacaattggtgagccttttctgcagcaggcaatacatatgaagtaaacaatcgagatncatatgggagcagctctatttatggtggcacagcctggaggttcgcatcatctgaggtt

SEQ ID NO: 5658 - DNA, 293 bp, Zea mays
  misc_feature: Incyte ID No: 700382096H1
  unsure 9, 19-20, 62, 82, 109, 130, 152, 174, 200, 208, 220, 224, 233, 243, 290: a, t, c, g, or other
ggggctttntcacactcannagcagttggcaaactacggcaggagctgccagatgttccttnctgattgctcgtttgatctntccacgttacaccttagatgcaagctngagactgtatatcactattanatgaggcaaaagatcattcggnggcgagaatttttcatagaganattggagaaagagatactacttatcnaatggaantggtgcagagangagntggcttgcngccttgtttnagtttctgatacctggattgtactcagttttggtggtagtgtagaangtt

SEQ ID NO: 5659 - DNA, 290 bp, Zea mays
  misc_feature: Incyte ID No: 700382103H1
  unsure 14, 97, 118, 131: a, t, c, g, or other
gtgtgctgcgtgantcaggggcgatgatggtgttgcttatgccatcattgagctgcaggaggagtgtgattcgcggggcacccagatcctacgccgntatactgattacaggaagctngcacgtctagcancagatataaactcctacacgaagaacctcctttcagtcatgggttccatggccagtgctgctggaggcaatgaagggcctgatcccagggaaattgagctttatcttgaggagattctcgcgttgacacagcttggggaggactacactgaattcatgg

SEQ ID NO: 5660 - DNA, 289 bp, Zea mays
  misc_feature: Incyte ID No: 700382104H1
tcagattggccttccagcatccactactgcggctagctttggaaaagtgaactcaagcaaactttctagtataaagtagaggatcttgctgcagccttactgaattctttcacatacaacattggacagatagcctactttgtggctaatctttcaggcctgaagagaattttcttccgaggtgcttatgtctgtggtcatgagaagactatggacaagatttctcgttccctaaaatattggtccaaaggtgaagttcagacgacatttctatgccatgaagggttct

SEQ ID NO: 5661 - DNA, 97 bp, Zea mays
  misc_feature: Incyte ID No: 700382106H1
  unsure 26: a, t, c, g, or other
gtctctagaatatgatcacacggcangcatcgagtgccttggcgacccaatgaaacccttgtacaagggcggcattgtccagaacagcgagttcaat

SEQ ID NO: 5662 - DNA, 283 bp, Zea mays
  misc_feature: Incyte ID No: 700382107H1
gcctgtcagatgccacaatatttattgttatgtatggcctcacaagtatgtactttgctggtgtgatggtccggttaattcttgtggcagcaccagccgtttgccttattagtgctattgctgcatctgctacaataaaaaacctaaccactttgatcaggacaaagagcagaagtccacagactacttctgggaaaacaactggctcaaagtcagctgctaagggtgcagttgatcaatctttaccatccaacacaatgctgctattggttttctctgggtg

SEQ ID NO: 5663 - DNA, 286 bp, Zea mays
  misc_feature: Incyte ID No: 700382108H1
tccaacatctaaagaagttctattttcacttccaagattatgttgatcttatcatatggaaggtacagtttttggatcgccatcacctatttgtcaagttcggtagtgtggatggaggggtttctcggagtactgaccaaaacctagctttctttgccgtgtacaacatggagacaacggatatcgtttcacttcatcagaattcttcggaggagctctatgccttgtttgaacaattttatgaccattttcatgcaaacccacaagcttcatcacatggaaaatt

SEQ ID NO: 5664 - DNA, 292 bp, Zea mays
  misc_feature: Incyte ID No: 700382117H1
ttggagacttctgtctgaagaaatatggaataatttctatgcctgatgttttctaccatcgcatcacggataaggatgaatttgttgtgctggcgactgacggggtgtgggatgtgctttccaatgctgaagctgttagcatcatcagcaatgctccttcacaggcctcagcagctcgatttctggttgaatcggctcacagggcatggaggacacggtaccccacatcaaaaactgatgattgtgctgttgtttgcctctttctgaaaacagaagcagcaagtacatcctc

SEQ ID NO: 5665 - DNA, 288 bp, Zea mays
  misc_feature: Incyte ID No: 700382119H1
  unsure 81-102: a, t, c, g, or other
gctctggttggaaggtttggagaaactccccggctcgaggagatcgtgacattgagaggacgatgggagggcgcgcgctannnnnnnnnnnnnnnnnnnnnnggcgttggtctttcagatccacgcctccgacccgctgctgtacgagccgttcgatgaggactttgaggggagatgggtcgtctccaagaaggatgaataccaaggtgtgtggaggcatgccaagagtgatggtcatgaggatatggcctccttgttagtgagaaggcaaggaaatacgccataatc

SEQ ID NO: 5666 - DNA, 287 bp, Zea mays
  misc_feature: Incyte ID No: 700382120H1
  unsure 175: a, t, c, g, or other
agagactgctcctggaaatgcaatgccagatggtataatgcacaatggaagttcaagtggtataataaatgacacaccatctggcgatcagttacttaatgctagtaaagacttgcatggccttcatagtcaaatagatgcttcaactagtctacagtcagaccagaatgcaacngctgtgctgtatggtgtagacaacgagacaagcgcaacaataaagaccgagtcttgctactcgagtaatgctgattttgccttctgtgggaacactttcctggaatcatgcc

SEQ ID NO: 5667 - DNA, 286 bp, Zea mays
  misc_feature: Incyte ID No: 700382123H1
aaaatgaagggcaactcgtgcaagctttttggaatccatctcgacagcccagccaaatctgaacctttgaagtctccgccaagcgttgccacaccggcagctgagaagtggatggcagacggaatcgacacagacaaaagctccgagccgcacaagacgccaaagcaacttcggtgctacacagacacaggtggatcctgtcccagagagatgcccacaagcttcaagaggcacacagtgcaaatcacaaggcgggtcgactaggagctgcaagaaggtccacaag

SEQ ID NO: 5668 - DNA, 180 bp, Zea mays
  misc_feature: Incyte ID No: 700382125H1
  unsure 128: a, t, c, g, or other
tcagatcggtgtcgatgttcacagtgcgctcaatgctgcattgaccggttaattggtgtcatcttaaattgtctgtcttttagattgagtttaactttgcaaatcctaaataaattatagtccatctnaaacatggacatatgtttcttgttacctgaatcctgcatggatttatttttg

SEQ ID NO: 5669 - DNA, 264 bp, Zea mays
  misc_feature: Incyte ID No: 700382127H1
  unsure 55, 159, 183: a, t, c, g, or other
gagatcgtgacattgagaggacgatgggagggcgcgcgctccttcctcctcctcntggtctcggcgttggtctttcagatccacgcctccgacccgctgctgtacgagccgttcgatgaggactttgaggggagatgggtcgtctccaagaaggatgcntaccaaggtgtatggaggcatgcnaagagtgatggtcatgaggactatggcctccttgttagtgagaaggcaaggaaatacgccataatcaaggagcttgatgag

SEQ ID NO: 5670 - DNA, 294 bp, Zea mays
  misc_feature: Incyte ID No: 700382129H1
cgcaccttagagccattgttagtttcggagattttgcaagcgagatgaaagcggaagtgagagattgggcgtctcctgcttttcttgggaagagttttcttcaatgggaaaacaagactaccaacttcccaataaacgtaaggaagatatctgtacaatcatgtataccagcggaacaactggagatcccaaaggtgtgataatcacaaacaaagctatcgttgctggtgttatgaccacagaacacctcctcaaagagaccgataaagtgatcacagaagaggatcctacttt

SEQ ID NO: 5671 - DNA, 291 bp, Zea mays
  misc_feature: Incyte ID No: 700382131H1
  unsure 51: a, t, c, g, or other
catttatcgttacaagacagaagaatattcccacacagctgtcaacaaatncaatgttattcccgattcaattccggactggttatttgactttatgccttgtcagggtggttttttcgttggtaatgttagtcctgccaggatggacttccgatggtttgcacttggaaacatgatcgctatactttcttctctcgcaacacctgagcaatctaacgctataatggatcttattgaggagcgctgggaagagcttatcggtgaaatgcctctgaagatatgttatcctgc

SEQ ID NO: 5672 - DNA, 287 bp, Zea mays
  misc_feature: Incyte ID No: 700382134H1
  unsure 75, 178: a, t, c, g, or other
cgtgccgcgccatggctccaatttttgctgatatggccaagaagtccccaaatgttgttttcctgaaagttgatntggatgaaatgaagaccattgctgagcaattcagcgtagaggccatgccaacattcctgttcatgagggagggcgacgtcaaggacagggtcgttggcgcagnaaggaagagctagcaaggaagcttgaactacacatggcctcgtagatcagtgatgccgtaatgtagtattcgcctaaataagaggacgcctcgcctcaactctgagaaa

SEQ ID NO: 5673 - DNA, 281 bp, Zea mays
  misc_feature: Incyte ID No: 700382138H1
actgcccgcgttcccgtgcccgtactaaaaataaataacggactgccatctcctcgtgcactccgccaaccgccgccgccactcgccactctcacgtctcgcccatcccgccactgctgctctccagagtccaggcgacccaggctgcgcggtcgctcggtgttgttagtcccgaccgccgccggccatggcatccaacggcatcgccccaagagatgtatgtgttgttggcgttgcacgcacccctttgggtggtttccttggtgccttgtcttccttgc

SEQ ID NO: 5674 - DNA, 279 bp, Zea mays
  misc_feature: Incyte ID No: 700382139H1
  unsure 43: a, t, c, g, or other
tcctgcacgcaacctcatctcgtcctccagatccaggatggcngtcctccttgagaccttgcctccccgagtgctctcggtgagctactttgtttcgatttatcaggaaatccgtttgcttcatgttgtgcaggctcatatctgattgctggattcggcaaacccgcgttggatcctgtatcgatctggagaaatcgcgaagtcgtcgtcgttcggttcggagcggatctgaggcgacgatagatggaggcggcgggatctctcggtctgcagtcctgc

SEQ ID NO: 5675 - DNA, 282 bp, Zea mays
  misc_feature: Incyte ID No: 700382140H1
agatccggagcagccgcagtcccaccgaccccgccgccggtcgccctccatctcctcgccgctgcctctcgtttctccttttcaataatcaagatgagccgtggtggtagtgccggtggtggtcaaagttctctgggttatctctttggaagcggtgagccccccaaaccagcagtggcaccagctgcaagtgctccacctgttgagaaaccatctgctgcaaagactgatgcggccaagcaggttgctgctggggttaccagccaaaccaataactaccac

SEQ ID NO: 5676 - DNA, 282 bp, Zea mays
  misc_feature: Incyte ID No: 700382141H1
  unsure 135-136: a, t, c, g, or other
agttgcttgacttggacgctgagctcgcgcactgcaggaggctcctgcagaacgatccgttcaacggcgacggacgtaataatggcgctgacacagtgaacacaacgattgacggcagaaatccggcggcgatcnnatgcttggatggcgcggaccttgtggggagcgccatgtcgcttttcgaagacgagaaggcgttcattttggagtcttgagcagactggaggaaaaccttggcattttcacaaacaggcttgcttccggtgacgccagaggtagtca

SEQ ID NO: 5677 - DNA, 297 bp, Zea mays
  misc_feature: Incyte ID No: 700382147H1
cccatctgctatcagcgaggacgaaggcacaaacccctcacctccctcaaaccctagccctcgctctcccgcttgttcccgtcaccgccatcatgggctcagatgcggacatggaggactacgggttcgagtactctgacgaagagccggaggagcaggatgtcgacattgagaaccagtattacaactccaaaggtttggtccgagacagacccagagggtgcacttgctggttttgatcaagtggtcagtatggagcctgaaaaggctgaatggggatttaaagctcttaaacaa

SEQ ID NO: 5678 - DNA, 120 bp, Zea mays
  misc_feature: Incyte ID No: 700382148H1
atacaaaacacatcctgcgatcctcgaagcctccgccgagcatcgatcatgtcggcctactgcggcaagtacgcggatgagctcatcaagaatgctgcctacataggcacccctggcaag

SEQ ID NO: 5679 - DNA, 285 bp, Zea mays
  misc_feature: Incyte ID No: 700382150H1
  unsure 14-15, 71, 244: a, t, c, g, or other
tctccttgcccgcnnccgccgctcgccgtttgcccctcgtctccgcaccgcgcgctgttgtccatccttgngcagcaaaaatgacggctggctacattgttggctcactggtcggatcctttgccattgcatacctgtgtgacacatttatctctgacaagaaggcatttggaggtagcacccccaagactgtttctgagaaggagtggtggcaagccacagacaccaagttccaggcctggcnctcgcactgctgggccaccggttgtcatgaaccccatcagc

SEQ ID NO: 5680 - DNA, 281 bp, Zea mays
  misc_feature: Incyte ID No: 700382152H1
  unsure 4, 17, 19, 21, 45, 59, 107, 171, 183, 186, 200, 229, 263: a, t, c, g, or other
ctcngctctcgcccgcntncnttctctcccccgctccagcttatngcggaggcggcgcnagcagccggcggcggcatcggggacatcctcgccacgagcgatcgggncttcctcgtccgcaactccggtgagcaggtgaagatcagcagcgttgaggcgagccctgtggcnatctacttctcngcntcatggtgcccgcnatgcaggaggttcacgcccaagcttattnaagtatacgaaaaactggcctcacagggcaagancttcgaggtcgtctttgc

SEQ ID NO: 5681 - DNA, 271 bp, Zea mays
  misc_feature: Incyte ID No: 700382154H1
  unsure 60, 219: a, t, c, g, or other
gctagccacactattacaagatgcctcctagtcgtttgcaggttggaacaaaaacaacanaaggacataaccaagcaggaaacacattacatccatatgaagtgcagcgccttagacaagttatgagaaacaatgcaaggctgcaacaactgggaattcctggtttatgcgacacactgccaaaggcatattcctttcatcacaacaaaaataagccanattttacaaataatgaagattcagaatctgattataatccttcatcaaatga

SEQ ID NO: 5682 - DNA, 276 bp, Zea mays
  misc_feature: Incyte ID No: 700382155H1
  unsure 90, 123, 133, 248: a, t, c, g, or other
gcacatctcttgcctcctctttcgcgctgtccggagaggaggggcaggaggaggccgcaccaaatctatctggggatcggagcgcgggcnacaagatgccacgcggcggcaagaccgcggctncgtcgaagcngaacccgttcgactcggactcggactcggagtccagcaataagccggcgaacaagtccggggcgtcgtcgtaccaggcccccgccgacgccaagaagcggtacaaggacgggttncgggatcgggcgggctggagaaccagtc

SEQ ID NO: 5683 - DNA, 102 bp, Zea mays
  misc_feature: Incyte ID No: 700382156H1
  unsure 17-18, 71, 100: a, t, c, g, or other
tcgaatccaactcctcnncgatccccaaaatcgaacccaagtcgaaaccctaacctcggccttgtcgatgncggccgccacaaccgccccaacccctgcngt

SEQ ID NO: 5684 - DNA, 289 bp, Zea mays
  misc_feature: Incyte ID No: 700382161H1
taggacatgagttctagtatttatcagtccttaatgaaggcgttgaccatggagtatgtggaggacataactgttatccgaatagttatgttccacatgactggctcattcttctgcaagtggttctgaaaagaataagtactggagatgaaaacgagtctgctcttctgttcaagcttctgggcacaatagttgagggtggacaggaaaaagttatgtcctcatattcctgaaattgtatccaacattgccagtactgtaatggagctcctgccccctgtcccaaatc

SEQ ID NO: 5685 - DNA, 294 bp, Zea mays
  misc_feature: Incyte ID No: 700382163H1
gagaggggcgttgtggcgctggctagctatagctcgatccatcggaagaagttgaaccacacatcaactaacctctctgtcgtctcgcggcgatgtgtgaatctccatcatcctcgagaggccggtggcgccatagatatgatcagaagacaccgtcgactcagaaacgcggtgatgtgtgaatcgtcaatgttcctgatgtcgccgtctccgtcaccgtcaccgccgcagccgtctaggccgccaccggagtacaagcacttctgtcgagtatgcaacaagggattcacgtgc

SEQ ID NO: 5686 - DNA, 300 bp, Zea mays
  misc_feature: Incyte ID No: 700382164H1
  unsure 161-200: a, t, c, g, or other
gctccatgctctagccaacgcacttcttgagcatgagaccctcacaggagcccagataaagaacatattagcccaggttcataacaaacagcaacatgagcatactatcgaagcaccacagaaggcctcagtcgcaccagcttcccccgcatcaccagctnnnnnnnnnnnnnnnnnnnnnnnnnnnnnnnnnnnnnnnncacagcaggcggcagccaaagctaagggggtggctggtatgggatcttagcacattagagcacccccactggtttgcattgtgtatatttcaccaaacaa

SEQ ID NO: 5687 - DNA, 276 bp, Zea mays
  misc_feature: Incyte ID No: 700382169H1
  unsure 3, 5, 7, 61, 108, 178, 194, 221: a, t, c, g, or other
ganancngggcctggagactcccctgggaggcaacagcggggtctgcagacgcccttctcnagccggagctgggactgttcagtcactgggagaagggatgtgggtcngaagagcttggttgcagaaacttcggggtctacaaacgcaggcgggagctgagccaaaagagcttgtttnctaggaggtgggagangcagccaggaggaacagctgggcaatncgggaggcagaggccaggcctcctcaagttggcctctcagacccacttgcagcct

SEQ ID NO: 5688 - DNA, 274 bp, Zea mays
  misc_feature: Incyte ID No: 700382170H1
agttgtgtggtcaggcactgaagaccttcaatgatctcacctcggaagttgcgcaaggccatgtactgcaggagaaatgcgtcgcggcgtcgtcgtctcctgtgctgaacgcaaacagcagggtggccggcggctcgtcgtcgtgggcctcagatggcaggaagatcctacgggaggaagaaatggtgggacgacgcggagtactgggcaagctatttcatccaccggctcttcctccattcagttgcagagtttaccggtactacctgtcgta

SEQ ID NO: 5689 - DNA, 277 bp, Zea mays
  misc_feature: Incyte ID No: 700382172H1
  unsure 60, 93, 117: a, t, c, g, or other
aaggggcgtccgagtctggaatcctatctgatcggaaaatggttaaggtcgaagacaggnccgaggacggcggcgcagatgctgatgccaggngtctcagggagtctgctctggatncgctgcctgtctcggtgcatgccagcttgaaggaggaggaaggtcaagcaagttcttcgtctggtaaactaagatcgcagtttattggaatggggttttcatccaagctggtagacaaggttctccagagacatggtgatgatgattctaacacaatttt

SEQ ID NO: 5690 - DNA, 278 bp, Zea mays
  misc_feature: Incyte ID No: 700382175H1
gttgaaagattgttgtcttcggaacagaaggctacagattatcgaacaccagatgatggagctgcaccagatcatcggccaactaatgcttgtataagaattgtagcctatctctctcgtgttcttgaggttgcattcagtgcccttgaaggcctcaacaaacagtcctttttgactgagctgggaaatcgcttgcataaggggctgcttaatcattggcagaagttcacatttagtcccagtggtggcctacggttgaaacgtgacataactgaata

SEQ ID NO: 5691 - DNA, 272 bp, Zea mays
  misc_feature: Incyte ID No: 700382176H1
  unsure 36, 90, 179: a, t, c, g, or other
cgccgctttgggttggggtttaagcgcgtgtaaggnaggccggagggacgacgacggcgccggcgtcggagaagaagaagcagacaactntcgtatatgtcttcttgccccttttccgatctggtggtcgtagcgctcatcatcgccgtcttcgccgtcatcctccgcgccctcgcttnctctggccgatctatgcgcaaggggctcaacggctggaacaaatcctcgtcgatgctcagggacgggttcggggtgaagtattccggattctc

SEQ ID NO: 5692 - DNA, 291 bp, Zea mays
  misc_feature: Incyte ID No: 700382179H1
  unsure 266: a, t, c, g, or other
acacaatggcaccagaaaggatgctcctcggcgtctgtgccgtgctgatggtggtcggcgtcacgaacgcggcggagggccaggtggcgtcggtcgtcgtgggcctggcgaggtgcgccgacagcacgaggaagaacatgaaggctgaggccggtttcaagggtcttcaggtggcgatcaagtgcaagaacagcaacggcgagtacgagacaaaggccgtgagtgagatccaaagctccggagccttcagcgtcccactcgccgcngactccacggcgccgactgccacgc

SEQ ID NO: 5693 - DNA, 292 bp, Zea mays
  misc_feature: Incyte ID No: 700382180H1
tcgggaggcgctaaagttggtggtggcgttggaggaaacgcgggaggaagtggcaaggcgtatacaggaaccggtgccgatgcgggtgtttccggtggaggatccggtggcgtcgatgctggtgtctccggaggcgccaaagttgacggcaacattggaggaaaagcgggagggagtggaaatgcatatactggagctgatgcaggtacaagtgtttcaggtggaggatccggtggcgccagtgcaggtaccagtgctaccgtgggtgctggtgtctccggagtgccaaatt

SEQ ID NO: 5694 - DNA, 279 bp, Zea mays
  misc_feature: Incyte ID No: 700382181H1
catacacaaagacagtcctgctgctaagtatttgatggagcgtggtgtggaccggaaggacttcaactcatatggtagccgtcgtggtaatgatgaagtaatggcaaggggaacgtttgcaaacattaggatcgtgaacaagtttttgaacggagaagttggacccaagaccattcatgttcctactggggagaagcttctgtttttgatgcggccatgagatacaaatctgagggccatgctactataatcctcgctggtgctgagtatggaagcggc

SEQ ID NO: 5695 - DNA, 275 bp, Zea mays
  misc_feature: Incyte ID No: 700382183H1
  unsure 7, 14, 16-17, 127: a, t, c, g, or other
gcaaggncacgtangnngtcgtctaattcttggatcgaattagacgacttcttcgtccctctcttcattagcacgctaacttgtaatctgcaggatctaagcaaagacttgatttagttatggacantttggtaggcctcttgaaagttcgcgtggtccggggtatcaaccttgcctaccgcgacgcaagaggcagcgatccgtatgtcgtcctacggcttggcaagaagaaactgaagacaagcgtgaagaagagatccgtgaaccccatatgg

SEQ ID NO: 5696 - DNA, 274 bp, Zea mays
  misc_feature: Incyte ID No: 700382184H1
aaatgctttcacaggtctgaccggaactggattttcaagcacatcattctcgtttggctcagcctctaaagatggctcaagtgctggtcccctatttgggctgaaagctgatggttcttcgttcccttcttttaatcttggtgctgccaccaatgggggttctgccacagctcttgctacttcagcagaggcacccaagatgtttgctatgacagagggccctgtcgaaaccggtgaagaaaatgagaaggctgtattcagcgctgattctgct

SEQ ID NO: 5697 - DNA, 274 bp, Zea mays
  misc_feature: Incyte ID No: 700382185H1
  unsure 12, 52, 119, 124, 130, 138, 216: a, t, c, g, or other
tccccaagcacngcagaggcgtcggcgtggctactggcttcgggtctacggngcagtcgctgaacgacgacatcctccggtccgtcttctcccggctggacgaccacttcgacctcgcncgctnctccgncgtctgcngctcatggaataggataattgaaacagctcatctcatgagggatatgtattacaaaaggaacccaccagcaagaggtncaagctctaatatttcagtaaaaagttactttgagatgcttgccatggatgagcatgc

SEQ ID NO: 5698 - DNA, 271 bp, Zea mays
  misc_feature: Incyte ID No: 700382187H1
  unsure 227, 229, 257: a, t, c, g, or other
tcatatccgggtagcagtatctctcgcttctctagccatgacgctggtgaggatgccttgccgcctctgctgcttcctgctcgtcgtcgccgcctccgccgccgtctccgggcgggggcgggtggtcaccaccctcccgggctacgagggccgcctccccttccacctcgaaacagggtatgtggaggtggacgaggacgccggcgcggagtcttctactacttcgnangggccgagttccggcgccgacgacagcnataccccgttcgtc

SEQ ID NO: 5699 - DNA, 277 bp, Zea mays
  misc_feature: Incyte ID No: 700382190H1
  unsure 95-97, 153-177: a, t, c, g, or other
atcagtcgcgtgtctaggtttcctctctcaccatagcgcccgctctgtcgcccttcgttcacctctccttcctctcgtccctgcctgccagggannngggaagtcagaggcacggagtggcgcagagcagacgcccgtgaaccattgtagctnnnnnnnnnnnnnnnnnnnnnnnnnaacccacacaaggaaaggatggagaagaagccgaccatcctcatgaacaggtacgagctcgggcgcacgctcgggcagggcacttcgccaaggtgtacca

SEQ ID NO: 5700 - DNA, 279 bp, Zea mays
  misc_feature: Incyte ID No: 700382191H1
ccggacggaaccaaacgccaaacgctgctgcgctctctccttctcgtcctgaccccccagagcgagagggaggggcacccagaggagcctgtcgttttgatcggtgtctctgcccccgttcccgcgaggagagaacaacctggagaaaatggcgccgatctccggagccacggcagtccttgtgatggccgtcgtcgccacgctcgccgccgcggctaacgccctggcccccgccccagcacctgctaccagtgacggaacaagtgtagaccagggaat

SEQ ID NO: 5701 - DNA, 281 bp, Zea mays
  misc_feature: Incyte ID No: 700382192H1
  unsure 8, 83, 147: a, t, c, g, or other
gccaacanctcccgcgacgcctcgagctacctcaccttcggtcccaacccggcggtgatggggccgggcaccatggagacggncatcgtgtacaacgtggacgtgaagccggcgtacgggcccttggtgacgggcatcttcgtgggncgggagcgcctggacatcccgcaggagatctgggatgccgagaaggtggtcggcggcggcgtcatcctggacacgagcacgtcggtgacgtcgctggtgccggagggtacgcggcggtgacgagcgcactggac

SEQ ID NO: 5702 - DNA, 282 bp, Zea mays
  misc_feature: Incyte ID No: 700382194H1
aaccagagctcctgactgttcctctctccctcctcacgggcgggctccgtctgttccgtccatccaccgccccggtcgtctcccggccagatccctctcctgcaagtttctttgcgagtggccggagaagatgatgggcgggttcctctccagggtctctgctggcttttggctatgctatctgcctatgaatgctacaagaccgttgaactgaacaaaccacagattgagcagctcatatttggtgtcagtattggattttagttgcccctgttgacagtt

SEQ ID NO: 5703 - DNA, 281 bp, Zea mays
  misc_feature: Incyte ID No: 700382195H1
  unsure 53: a, t, c, g, or other
ggaaagcaatcacagccagacgagatccgagcagagaaggggagctacctgcnacgactagctagattccacacgcgatggcgcccaccaggatccgcgtggccttgctgagcttggcgctggtggggctgctcatctgccacctcgccaccaccgcctccgcggggaagaacagaatccgcatcctcgacagcgtcgacgactcggccggggacaacaacagctccgacgcctcggccggggacaacagcaccgactccgagtcggaaggccgcgtcgtc

SEQ ID NO: 5704 - DNA, 290 bp, Zea mays
  misc_feature: Incyte ID No: 700382196H1
accaacgtcccaaagctgggggtgatgctcgtcggatggggcggcaacaacgggacgacgctcacggccggggtgatcgccaacagggaagggatttcgtgggagacgaaagagaaggttcacaaggccaactacttcggctccctgacccaggcttccaccatcagggtcggctcccacaacggggaggaggtctacgcgcctttcaagagcctcgtgcctatggttgaccccaatctatcgtgtttggtggatgggacatcagcaagctgaacatggcgacgccatgg

SEQ ID NO: 5705 - DNA, 312 bp, Zea mays
  misc_feature: Incyte ID No: 700382201H1
  unsure 2, 110, 118, 128, 130, 159, 168, 171, 196, 208, 220, 248, 250, 253, 255,: a, t, c, g, or other
angatcctgcactcttgggttcttgcatcccgcataccctgcgaaagctcgaaagatcccgcggcgcacagccacccttctctcctctccgctcccaatcttatcgtcgnctccctcnaagtcgccgntnccttcattccaccatgggcggttcacgcnccggtccangtnatgaaggactcgctgaagcgggagnctggcgcgaagnttcacgaagccngcatccaggcggccaaggctgttgctgncntcntncgcncgacnttggtccagatcgaggtgaaatgctnctggacgtggtggaggtatttt

SEQ ID NO: 5706 - DNA, 310 bp, Zea mays
  misc_feature: Incyte ID No: 700382202H1
  unsure 146-168, 235, 291: a, t, c, g, or other
aacgcttatattacttacaacaaaagataagcccacgaatcagtagatcgaggtcccgtccagtccagcagaagcgcacacgatgtcccagctgagccctgctggccacatggctgcgacgctcctcctcatcctcctggcctccnnnnnnnnnnnnnnnnnnnnnnntgaccaacaggtctctgcctgccagaatgacatagacgcactgtggcgcagtgcaagcagttcgtcnagaaggaggggccaagatgcctcgtccgaggactgctgcaaaaccatcaaggcttngacgcgcacggtcttgcat

SEQ ID NO: 5707 - DNA, 248 bp, Zea mays
  misc_feature: Incyte ID No: 700382205H1
tggacttgagttcagtgatgtatacacagctcttggaagtgaggttacttttgttgaagctcttgaccagctgatgcctggatttgatcctgaaattgcaaaattagcccagagagttcttatcaatcctcggaaaattgactatcacactggtgtttttgcaagcaagattactcctgcaaaggatggaaaacctgtgctcatcgagcttattgatgcaaagacaaaggagcacaaagaaacccttg

SEQ ID NO: 5708 - DNA, 254 bp, Zea mays
  misc_feature: Incyte ID No: 700382208H1
  unsure 10, 13, 17, 19, 32, 46-47, 71, 89, 106, 112, 121, 132, 135, 137, 173,: a, t, c, g, or other
gacgcaacanganggcnanggccatggcttcnccggacctcgccgnnggcgacggcagctacgactttcancttcgctctctctccgcngcctcacgggactccgntgcggncatccgacnccgcctctaanccnancctcctcgaatctgttaggagggtgtgcgatatgtncngaaacgnngaangaagcgaaggacgagatggtggcgcgggcgttccngtgatgggcaagctatttcagcnagtgccgct

SEQ ID NO: 5709 - DNA, 256 bp, Zea mays
  misc_feature: Incyte ID No: 700382209H1
  unsure 19, 21, 234, 245: a, t, c, g, or other
aaggcagagaaagagagananagagagagatggatgaggagtacgacgtgatcgtgttggggacggggctcaaggagtgcatcatcagcggcctcctctccgtcgatggcctcaaggtccttcacatggacaggaatgactactacggaggagaatcttcgtccctgaatctaaccaagctctgggaacaggttcaagggcaacgacagccctcccgagcacctgggcgtcaanaaagagtacancgtcgacatgg

SEQ ID NO: 5710 - DNA, 258 bp, Zea mays
  misc_feature: Incyte ID No: 700382210H1
  unsure 2, 123, 135, 186, 243: a, t, c, g, or other
gnagaatgcttcatcagtggccacatgcccaaccctcaccaccaagtgtagctccagaattggcacccactggtagatctcatgctcagggatggaaatccagtaatcccaataacaaaacanatagattacctnccccatcttatccaccgcctcgtgctcaagggcccgaggtctcacaaaagnccaagacagactgggactaaaaactatactcaccatgcgcctccaccattccctcanggacaccctagcttt

SEQ ID NO: 5711 - DNA, 258 bp, Zea mays
  misc_feature: Incyte ID No: 700382211H1
  unsure 4: a, t, c, g, or other
cacnaaccttcggcacaccgcgatcgggatcgcctcagcaagaaggacgccaggaaggcggagaaggctgagaaggtggcacaacgccaacagcagcatctgttcaacaccgaagacctattcgcggccaactacagtgatgtcgtcgtcgaggagattcagttaaaggccatctccgtgatgtttgatacatcctaaagtgcttcatagacaataatgcagggatagggaagaatgtgataatctccaactctgaag

SEQ ID NO: 5712 - DNA, 240 bp, Zea mays
  misc_feature: Incyte ID No: 700382213H1
  unsure 15-16, 40, 80, 109, 148, 161, 173, 175, 215, 224: a, t, c, g, or other
acacacaagctatanntagctatagcttgcatcaccatgncagcaggaaggatgctcctcggcgtctctgccgtcctganggtggtcaccgtcacacacacgggcgganggccaggtggcgtcggtcgtcgtgggcctgggcgaggtncgccgacagcacnaggaagaacatnanaggctgaggccggtttcaagggtcttcaggtggcgatcangtgcaagancagcaacggcgagtac

SEQ ID NO: 5713 - DNA, 240 bp, Zea mays
  misc_feature: Incyte ID No: 700382215H1
  unsure 38, 52, 68, 125, 145, 188, 224, 240: a, t, c, g, or other
ttggaatgaaagcatgccatgtgtttcaattcatcctngcggcttgcctttnttctctcagtttggcncatgattatcccattcattacctattggatatggcggttaacattggtgagaagtantggtgaagcggaaaggctgntcttcagtgacatcagtgctcagttgattcttagcgatgcctncatgtgttccttgtctcagcgatcatggtccttatntttctttgagccaccn

SEQ ID NO: 5714 - DNA, 240 bp, Zea mays
  misc_feature: Incyte ID No: 700382216H1
  unsure 83, 145, 205: a, t, c, g, or other
ggggactttcgcgagcacggtgcacctgagcgggagactctggctcgctagcatgatgatcggctcgggaagcctgctgatgngcgccggcctcaagttcatccctgtcgatccgggcagtgaaggctcgtctgaccgccacgangggtaccagcccatccccaccggccccaacgccgtgtgatttccaagaagacctcctgcnatccttcttgatttttatttcctttatagaaacaa

SEQ ID NO: 5715 - DNA, 246 bp, Zea mays
  misc_feature: Incyte ID No: 700382217H1
  unsure 6, 17, 30, 35, 63, 231: a, t, c, g, or other
ccgaantcgtgccttcncttcctccctggnatggnggaagtagctgtttcacctatgatcgtnccgccgtagtgctggacaacaatggcgccgacgcggtctcctgcactgccataccctagcgtaacaataagcctagaggagaaagaaaatatcaatggggatgttccacgatcacctcggccgcaagcaacgaggaggaggcgttgttcagtgtcggagaatccacanggacgatggccatcg

SEQ ID NO: 5716 - DNA, 309 bp, Zea mays
  misc_feature: Incyte ID No: 700382218H1
  unsure 8: a, t, c, g, or other
cgaaaganagccggaaaaaaagggcaggaaatcgccaccgcccgcacctattagagcagccgcttgttccttccgcaatccgcgtcctcgctgctcctcaattcgattggctccgtgtcgacctccaggttgagaaggaaagcatcgcgagttcgccatacggatgggttccaaagcgcctttctgtctcacgctcctcttgctgctcgccgcggcctgtggacctgctgcacatgccaacgatgctgtcttgaaggaacatatttcttcaaccaagattctgcccgtctcaagaggggcagcggacta

SEQ ID NO: 5717 - DNA, 246 bp, Zea mays
  misc_feature: Incyte ID No: 700382219H1
  unsure 65, 144, 154, 156, 178, 240: a, t, c, g, or other
gttggttatacagttcctggtggtgattattgaaattgtatttaactattttacaatatttaganagcctatttggtttcaatagagttcatgtatcttttcattcttgatgaaattctggtatagagtttgatgtttgaagcncccaaatgtnantatgtttatgaactagcgagtncatgttttagtcaaacatgagctagcgagtgataaatattcgagaacggaaatagtattatntaattc

SEQ ID NO: 5718 - DNA, 239 bp, Zea mays
  misc_feature: Incyte ID No: 700382220H1
  unsure 34, 38, 49, 117, 147, 155, 168-169, 178: a, t, c, g, or other
catccagaaacctgtgccatagacgaagagccanacanctgtgaggcanctcggggttggaagttgacactgctctgcttgggcctgttcatgtttgctgttggggagggctgcaancgtgcctgcgtaccacccctcggtggagancagttcancgacagtgacctnnagaaaccgncagcttcaagagtacgttcttgaccaggctaagctcgcaaactctctcggagcgatgattg

SEQ ID NO: 5719 - DNA, 305 bp, Zea mays
  misc_feature: Incyte ID No: 700382222H1
  unsure 290: a, t, c, g, or other
cgcggagtggaggtcgaccgacattgaattccctctttccttctttgccgctcaattgcccccttgctccgcgggaagtggccaccggtcctgcctgcgcaatccattttgttcgtactattattgtgtaaccattgtgctccgtggagccgtagaggtggagatctgggttgccatttccagaccctggccgcgtccgctgcgatgggtcgaaacgtctgggcggttccgttggcttcccttcttgcgtttggtttggtgctcggctccgtcgaggccaacctcggggntgttgatccgcgtta

SEQ ID NO: 5720 - DNA, 233 bp, Zea mays
  misc_feature: Incyte ID No: 700382225H1
  unsure 74: a, t, c, g, or other
tcgtcatggagagcaggaggaagaatcaacagaagacgagctacattgtaatttccatccaactcctagcgacncctcctactcttggagcttgtgtcgctagtgccgggggcgtcatgcgaggagttgcccttggatttttgggtgagtgcactacggggggtcggggcaaaggacgtttcaacagccgatggatgcaccaagaagaataaggacaccgtgctctgctctgc

SEQ ID NO: 5721 - DNA, 251 bp, Zea mays
  misc_feature: Incyte ID No: 700382226H1
  unsure 9: a, t, c, g, or other
ctgtatgcnagtattatttgaagactgggacttgtaaatttggttccaattgcaaatatcaccatcctaagcaagatggatctgtgcagtctgttatattaaacaacaatggattccctctacgtccgggtgagaaagaatgctcctactatatgaagactgggcaatgcaagtttggttctacatgtaaatttcatcatccagaatttggtggtattccggtaacccctggcatatatccagcattacag

SEQ ID NO: 5722 - DNA, 250 bp, Zea mays
  misc_feature: Incyte ID No: 700382227H1
  unsure 25, 29, 78, 159, 223: a, t, c, g, or other
gattcaggaactagactcctccggnccgntcctccccctcccgccccgtctcgctccagcggctccacgccaccgttngccattcactgccagaatggcgctcaacaaggagtacacgtacgcggagtggagaaggagccgtactggccgttcgagaanctgcgggtctccatcaccggggccggcgggttcatcgcctcccacatcgcgcgccgctcaaggncgagggccactacgtcgtcgcctccga

SEQ ID NO: 5723 - DNA, 246 bp, Zea mays
  misc_feature: Incyte ID No: 700382229H1
gaacgtcgtacgagaacctttctccctcctccacctttctccttttcttgccacggcaaaacaccttcgccggcgagagcatggcgatggcgtaccgtgtcctggaggtcaccctggtgtcggcaaatgacctcaagaaagtgtcgctcttctcccggactcgcatctacgccgtggcttccatctccggattcgacctccgcatcccttcccacagcacccaagcagaccacagcaacggctgca

SEQ ID NO: 5724 - DNA, 247 bp, Zea mays
  misc_feature: Incyte ID No: 700382230H1
  unsure 20, 39, 63, 66-67, 84, 128, 130, 153-171, 179, 196, 200, 213, 226, 242: a, t, c, g, or other
tcgcgtgtctaggtttcctntctcaccatagcgcccgcnctgtcgcccttcgttcacctctcnttnntctcgtccctgcctgcnagggagaggggaagtcagaggcacggagtggcgcagagcagacncncgtgaaccattgtagctgtcctnnnnnnnnnnnnnnnnnnnaacccacncaaggaaaggatggagnagangccgaccatcctnatagaacaggtangagctcgggcgcacgnttcgg

SEQ ID NO: 5725 - DNA, 247 bp, Zea mays
  misc_feature: Incyte ID No: 700382231H1
cagccacccccgtagcgagagggagggcggaagaggatgagcgcgtccaggttcataaagtgcgtcacggtcggggacggcgccgtcggcaagacctgcatgctcatctcctacacctccaacaccttccccaccgactatgttccgacagtgtttgataattcagtgccaacgttgtggttgatggtaatactgtcaacctcggcctctgggacatgcaggtcaagaggattacaacagatgagac

SEQ ID NO: 5726 - DNA, 304 bp, Zea mays
  misc_feature: Incyte ID No: 700382232H1
  unsure 45: a, t, c, g, or other
gcgaacgcgtgcatgcgcagacgttgaggtcgagggacacggtanctctgagcttcatcggagagcgacccgccaccgccacgcttggccgcaagccgagaagagtgccgggccgggagaccggacgattattgatccgtagcagattcgctaatggcggatacggcggacatggagcggatcttcaagcggttcgacaccaacggcgacggtaagatctcgctgtcggagctgacggaggcgctacggacgctggggtccactctgcgacgagtgcagcgatgatggccgagatcgacaccga

SEQ ID NO: 5727 - DNA, 307 bp, Zea mays
  misc_feature: Incyte ID No: 700382236H1
  unsure 20-21, 55-56, 70, 92, 107, 183, 256-257, 272, 291, 305: a, t, c, g, or other
gctcttcccgccaccagctnnctgcagaggaaggggaagtccgtggctgacaagnncggcgccgccgccncccgccaactgtggcggcaganaaggtggtggtcgcngtgagggcagccacgagggagatctccaagacggccatcatctggggcgctcacgcatgtcgtgcagccagagcancagcatcatacttcttgtacgtcatcccggcacacagctctggcagaaagttctggggctttccgctgttcgnnggagactgtgcaatngccataagtctaggttggntcagaatgtgattnat

SEQ ID NO: 5728 - DNA, 300 bp, Zea mays
  misc_feature: Incyte ID No: 700382237H1
ggttaggtacctatcctagccgtgtttgcaggcctttcagattgaaccgattacttcaacggtgtcatacatgattggtagggatgtgatggagggagggggcaatgcaggtgcagcataataccctggttgtatttggcttgggagtaagtggatgttagcaatagtggagcatgtgtgggaagcggaggccgatgacagctcttacgttatcaaggaacaaacttatcctgagaaagtgctcacacgtggaacacagactactctttatttgagagatgatgacaagtatgagtttac

SEQ ID NO: 5729 - DNA, 244 bp, Zea mays
  misc_feature: Incyte ID No: 700382238H1
  unsure 101-123: a, t, c, g, or other
caggtccagcaaagattggggacgcgtaggcatcggagattgcctcgggagcgcgtttcctggtcaactaaggccggcatgaagggctgctcagagcgctnnnnnnnnnnnnnnnnnnnnnnngcatcgtcgtcgttactgtccgctgtgattgccgcgcagagacttgccccgccgacctcgacagcaaatgcgatggtggcgcgtctgatgatgattgggagggggagttcttccccggcgt

SEQ ID NO: 5730 - DNA, 246 bp, Zea mays
  misc_feature: Incyte ID No: 700382240H1
gagtgatcctcagaaagtttgggtggggagttgcagctacaatcacgcctgcagtgttactcctcacaggagttgggttcttctcactgattttgtttggtgagccattgactcctcttatgaccaagtttgggatgacacctttgcttgcggcagtctatgttggagcaatgcagaacattttcagtaagagtgcaaaatacagtctgtttgatccttgcaaagagatggcatacattccttgga

SEQ ID NO: 5731 - DNA, 309 bp, Zea mays
  misc_feature: Incyte ID No: 700382241H1
  unsure 182, 185, 202, 224, 227, 250, 273, 283-284, 302: a, t, c, g, or other
atttgaacgaaccccttcagattgtcttggaggactgtcttatggaagttgttagaggaattaatgacgtacggccactctatgatatgatggcaatcacattggagaatttgccttctatgccaactgttgccagagcaacccttggaagcttgctgatcatttcacacataatctcgttncanatcagtatcttccaacnattctgatggtatttccagaanacnttctccagcagatactgaagtcnatgttacatactggtatggatancgtgtggganncaccacatggtttctggntatatgg

SEQ ID NO: 5732 - DNA, 306 bp, Zea mays
  misc_feature: Incyte ID No: 700382242H1
  unsure 5-7, 14, 60, 178, 237, 250: a, t, c, g, or other
ctggnnnctccgcncctcgccgttaccgcgacgcttcggcctctggctccaccgcctgcntccgtggctccgtgacgagacacgacgccgagaggtcacccccacaccgcgccgaggccaccccgcttgggattgtgaggtaaagcgtgatggcagcgccaccggcgagggcccgagncgactacgactacctcatcaaactgctcctcatcggtgacagcggagttggaaaaagtngtctcctgttacngtctcagatggatcattcaccactagtttattacactattggcattgattcaagat

SEQ ID NO: 5733 - DNA, 305 bp, Zea mays
  misc_feature: Incyte ID No: 700382243H1
  unsure 187, 265, 295: a, t, c, g, or other
cttccatgtgacatttggatcagaaacaatgaaaaaccttgatctgctgaaaattgactgctgcagtgggtggttagatcagctttctggcctgcttcatctatctgaactcaaggaagtctggctgaagggctcctacgaggatacactgaagcatggtctggaggaccagcttgcagcccacccnaacaatccgtgctgaagctggaggaagaagcgccacgtcagtaaaacctgatggatgctaacctctggaatgccattnccttctgtccacacattaccgtttatatgngcaagccgat

SEQ ID NO: 5734 - DNA, 254 bp, Zea mays
  misc_feature: Incyte ID No: 700382245H1
  unsure 19, 48: a, t, c, g, or other
cttttcaataatcaagatnagccgtggtggtagtgccggtcgacctcnatctcctcgccgctgcctctcgtttctcttttcaataatcaagatgagccgtggtggtagagccggtggtggtcaaagttctctgggttatctctttggaagcggtgagccccccaaaccagcagtggcaccagctgcaagtgctccacctgttgagaaaccatctgctgcaaagactgatgcggccaagcaggttgctgctgggg

SEQ ID NO: 5735 - DNA, 255 bp, Zea mays
  misc_feature: Incyte ID No: 700382247H1
  unsure 114, 174: a, t, c, g, or other
aaggcctagagaaatttctatggaaccaacaatggtttaccagtgtcactgcaaaaagggtcaagaaactagctgttgaacttggcaatcctaacgtagtgtggagtgcaagcnaggatggtactctgagacaacatgattttcgggagtgtagttcctgtcctcgtgcagganccgctaatcaggaatgtcacaatgtgcttcttgatctacggtgcggacaaaagaagtctttagccgattacccaaacatcc

SEQ ID NO: 5736 - DNA, 245 bp, Zea mays
  misc_feature: Incyte ID No: 700382249H1
atcaagtgggcttctcgctgggacacctacttgttaatgatagatgatcaaattcactggttttctattgtgaactctctcatgatcgtactcttcttatctgggatggtggcaatgattatgctccgcaccctttatagagatatctctaggtacaatcagcttgaaactgaagaagaagcccaagaggagacaggatggaagcttgttcatggagacgtattccgccctcctgcaaactccga

SEQ ID NO: 5737 - DNA, 300 bp, Zea mays
  misc_feature: Incyte ID No: 700382250H1
  unsure 2, 10, 50, 58, 81, 91, 97, 105, 142, 164, 166, 195, 207-208, 234,: a, t, c, g, or other
gnaattcacnccgatcggttgagttagtttgcagccaagatgaacgacgncgacgtcnggaagcatgtggagcagatggtncggttcatcntgcagnagtccgangagaaagccagcgagatcagtgttgccgccgaggagnagtgtcagcacccgagaagtgnanctggtggagtcggaagaacggagggtgcngcaggagtacanngcaaggagaagcaggttgacgtccgnagaagatcgagtactcgacggagctgaacgcggcnngcatcaagcngctgcgtgcgcaggacgagt

SEQ ID NO: 5738 - DNA, 299 bp, Zea mays
  misc_feature: Incyte ID No: 700382252H1
atcttaaagagaaagataacggcagttctccagaatcttcaccattgaaagacaaaacaacagcagacgatgattcgtaccaatgtttgcttggttctgcaagcgatgtgcgtgatccaataactactccggtgtggttctgttaatttctttgcctaaccagaaagaagatccacaactgcctcagttatcaaagagttgcatgagaatcaaagaccgcagtttgcagatttcttctgtacagaggtacatcatgaagaagctggatctagctaatgaaaacgagtggagatcatctg

SEQ ID NO: 5739 - DNA, 244 bp, Zea mays
  misc_feature: Incyte ID No: 700382255H1
  unsure 16, 20, 22-23, 71, 84, 93, 109-110, 119, 146: a, t, c, g, or other
cccccttccacccgcngatngnnctaccgctcgctccaccgcggcgggcgatcgctcatctccccctaacntcccccgctcgcnattcccgangcgaggtgccacccanngcagatttnttccgacggacggttggctcgctcacnccctacttcgctgatcggatcgcgtgctgcccgaggtagaggtgatgataaggcatagttgtttgacttagcctgacttagtatttcttgaagctaag

SEQ ID NO: 5740 - DNA, 247 bp, Zea mays
  misc_feature: Incyte ID No: 700382258H1
  unsure 106, 113, 120, 132, 136, 139, 145, 208: a, t, c, g, or other
atccttagagaacacaaagagttttcttcaacaacttgtgttgcatttgcacctgcttcttgcatgacatgggaattagcagaatcaggcaagcattttgtgacancggttgncaatggngttgatacagtngganccngatcancctccattgacaaccgttgtcaatggagctgatctggttcccactgtatcaactgcatctatngatgatctccgttctgaggtaacagcttcatcatggttt

SEQ ID NO: 5741 - DNA, 246 bp, Zea mays
  misc_feature: Incyte ID No: 700382259H1
  unsure 45, 86, 122, 212, 214, 240, 244: a, t, c, g, or other
cttcaatcatctatatatgacatgaagcaagagacaataattctnactatttttttcgacattatccatatcagtagatgtttgtngtaatgtgatagctcatattctattcattcaatganaagctacccattacatttttcttaagaaaaaaacagagaggaacaatcttttgttgctagagaaccaatttccctttctaaaaacatgcncnccatattttatgggatggagagaatntacntc

SEQ ID NO: 5742 - DNA, 251 bp, Zea mays
  misc_feature: Incyte ID No: 700382260H1
  unsure 141, 158, 162-163, 175, 196, 201: a, t, c, g, or other
cacagagacaccaagcgttgaactcgcctaagcagctatcaaccaaccctagaaagctagacaccgtacccatggctcgcgctaggtcgtctttgtcattgccgctctcctcttcgtcgccatggtcgtagcaccgatggncgaggcaaagtccgccnatgnncctgtggctgangcgccagccgatggacctagngggcnggctgctgcacctggccccagggtgtcgaaggcctgtcaggcaatgagga

SEQ ID NO: 5743 - DNA, 252 bp, Zea mays
  misc_feature: Incyte ID No: 700382261H1
  unsure 24-25, 32, 48, 55, 70, 166-167: a, t, c, g, or other
gttggtgaaaaacaggctgaaacnngtttctngtcatatgtgtcagcnccagtgntcgtcgccggcgtanttgcgcgttcaggacctgctccttgggcttcttggcggccatctccagtggcccgtatgcgtcgagggacatggtcttgacagagccatgctcgtnngcggcaacggtagtagcagcagcttcttcgtcagccttgctctgacacatatgaccagaaacccgttggtgaaaaacaggctgaa

SEQ ID NO: 5744 - DNA, 256 bp, Zea mays
  misc_feature: Incyte ID No: 700382264H1
  unsure 140, 155, 185: a, t, c, g, or other
agcatcgatggaggacttctatgaggcaaggatagacgacgttgacggagagaaagttggaatgtttggtgtgtatgatggtcatggaggagtcagagcagctgagtacgttaagcagcatcttttcagcaatttaatcnaacacccaaagttcntcactgataccaaggccgctattgctgaancttacaacccgcacagattcagaatttctgaaagctgatagcactcaaactcgagatgctgggctcaactg

SEQ ID NO: 5745 - DNA, 240 bp, Zea mays
  misc_feature: Incyte ID No: 700382266H1
  unsure 240: a, t, c, g, or other
ctagatcttttgctagctgagacacaaccaacgaagatctgttcccaggttggtctgtgcacttttgatggcactcatggtgtcagcgctggaattcggagcgtagtggatgatgaagctgggaaatcaaatggtggtctcaagagtgatccaatgtgcaatgcctgtgagatggctgtggtatggatgcagaaccaacttgcccagaacaagacacaggagctcatcctgaactacatn

SEQ ID NO: 5746 - DNA, 300 bp, Zea mays
  misc_feature: Incyte ID No: 700382267H1
  unsure 130-153: a, t, c, g, or other
ggacgacgaggagcacgaggtttacggccaggagatccctgaggacggcgatatggacggcgctgacgttgatatggccgccgccggggacgacgcggcgaacttcaggagcttgacgagatgaagcgcnnnnnnnnnnnnnnnnnnnnnnnnccgccgccctccgcgatatgcaggccaaggtcgccaaggagatgcaaggaggtgaccctagtatatctacagctgaggcgaaggagcaggtggatgcccggtctgtgtatgttggaaatgttgattatgcttgcaccccagaagaag

SEQ ID NO: 5747 - DNA, 297 bp, Zea mays
  misc_feature: Incyte ID No: 700382268H1
  unsure 43, 45, 147, 155, 249, 285, 296: a, t, c, g, or other
catcctgaaacctgtgtcatagacgaagagccaaacaactgtnangcagctcggggttggaagttgacactgctctgcttgggcctgttcatgtttgctgttggggagggctgcatgcgtgcctgcgtaccacccctcggtggagancagttcancgacagtggacccaaagaaaccgcagctcaagagtacgttcttgaccaggcttaagctcgcaaactctctcggagcgatgattggattggcctncttagtgtggattgagataactggggctgggacatngggtttatgant

SEQ ID NO: 5748 - DNA, 295 bp, Zea mays
  misc_feature: Incyte ID No: 700382269H1
  unsure 177, 256, 290: a, t, c, g, or other
gtttttgaaagggaagtgactcaagaccaagtaattctgatggctgctagagcctcccgaatagaaaatcaagatgctattgatactgctatagttggcatgctagctgatccaaaagaggcccgtgctggtattcaagaggttcatttccttccatttaatcctacggacaaaagnactgaccttgacatacattgatagtgatgggaagatgtaccgtgttagtaaaggtgcgccagagcagattctcaacctngcctacataagttggagatagaacgaagattcangctgt

SEQ ID NO: 5749 - DNA, 240 bp, Zea mays
  misc_feature: Incyte ID No: 700382271H1
  unsure 56, 201: a, t, c, g, or other
cggcgaggacgaagtggcccgcccaggaaatggcgtcgatgcagagctggcgcaangcctacggcgccatcaaggacaccacaaccgttagcctccgccaacctcaactcggacttcaaggatctggatgtggcgatcgtgaaggcgactaatcacgtggagtgcccacccaaggatcgacacctgcgaaaggttgttgcngcgacatccatcaccaggcctagggcggatgtcgcctac

SEQ ID NO: 5750 - DNA, 304 bp, Zea mays
  misc_feature: Incyte ID No: 700382273H1
  unsure 40, 255: a, t, c, g, or other
aatgatgagaagatcactgagaataaaggcaatgtgagtnaggagcaggccgatgccgttgaggaattgaaagggctgtctgctggggaaactttacaatctgttcccaaggttgataaaagcccttcaaataaagatcaagatataatctcgagggaggatttaaaagaagaattcactaaatttggcacagtgcggtatgtggacttcagcattggggaagattctggattcattcggtttgaggatcctgcnagcagctgacaaggcccgtgcatttgcagccattgcagatgaaggtggt

SEQ ID NO: 5751 - DNA, 300 bp, Zea mays
  misc_feature: Incyte ID No: 700382275H1
  unsure 27-28, 30, 265, 290, 298: a, t, c, g, or other
aagaaacaatccttgcacccctccccnncntcaccccaccacatccggccagcccaacgaaaatgtcgcgcgccacagctgcggtcctcttctacatcctcgccgtcgctgccctcagcgcggccgaggcaccggcagagtcaccgaaggcaggcagtcctgccaaggcaccggccgagtcaccgaaggcaggcagtcctgcagctcctgccaaggcacccgagtctgctgccacgagaactgcccccgctaaggcactcaagcngcttcacccagccgttgccgctgcnccatcgtngt

SEQ ID NO: 5752 - DNA, 316 bp, Zea mays
  misc_feature: Incyte ID No: 700382279H1
  unsure 2, 4, 111, 169, 171, 229, 256, 271, 279, 282, 285, 309, 313, 315: a, t, c, g, or other
cnangcggccaccgaggccaagcgccagcttgatgaggcgacgacggagaacaccatgtccggcgaccacagggtactgaccacgggcctcatcggcacgtttcgatgagntccaagaacgggcgcagcggggtgcccgcccagcgacttccccaagtggctgccggcnanccagcggaggctcctgcagcagacccagaagcctaacacggtggtcgcccaggacggnagcggcgacttcaagaccatcaccgangccatcaccgccgtncccaacanttncgnggggcgttcgtcatctacgtgaangccngna

SEQ ID NO: 5753 - DNA, 310 bp, Zea mays
  misc_feature: Incyte ID No: 700382280H1
  unsure 280, 290: a, t, c, g, or other
gtggaagcatctgatttggcaaacttccttaccatggatcggaatgggggttaccgaggttcacaaactcttctaagatctgtattatcagagaaacaagagctgtgcttctctgttgtctcattgctctggcagaagctcatagcttctcctgaaatgcagatgtctgcagaaagtacatcagctcaccaaggatggaggaaggttgttgatgcatttgtgatgtcgtttcagcctcaccaaccaaggcatcagctgctatcgttctccaggccgaganggacttgcanccttggattgctagagatga

SEQ ID NO: 5754 - DNA, 298 bp, Zea mays
  misc_feature: Incyte ID No: 700382281H1
  unsure 49, 94, 135, 239, 292, 294, 297: a, t, c, g, or other
agctgacgacaccaccgtgtggtcgacaaaataaaaaggagagagaganagatggctctgtcgtctcgccgtatggccgccgcaccattcttcntcgtcgtccttctcgtcctcgtggcggcagagaggacgatnggcagggtggtggtggaagagacgctctgcttgtcgcagagccatgccttcaaaggcgtgtgcctcagcaacaccaatgcgacaacgtatgcaagacggagaanttcacaggcggcgagtgcaagatggacggcgtcatgcgcagtgctactgcaanangtnt

SEQ ID NO: 5755 - DNA, 240 bp, Zea mays
  misc_feature: Incyte ID No: 700382282H1
  unsure 32, 46, 79, 145: a, t, c, g, or other
agaggacgatgggcagggtggtggtggaaganacgctctgcttgtngcagagccatgccttcaaaggcgtgtgcctcancaacaccaactgcgacaacgtatgcaagacggagaagttcacaggcggcgagtgcaagatggacgncgtcatgcgcaagtgctactgcaagaaggtctgctagggcatgaccggcagcaagccccagccgtacggctggttgatccggttgcacaccgttt

SEQ ID NO: 5756 - DNA, 300 bp, Zea mays
  misc_feature: Incyte ID No: 700382283H1
  unsure 5-6, 52, 84, 88, 92, 96, 176, 202, 274: a, t, c, g, or other
ccagnncccagggccgagcaacctggtgctccgccccttcgccgttacagcngcgcctcggcctccggttccacagcgtctgcntgcntgcncggncctgtgaccgtaaccgcgacacgacgccgagagatcacccgccccccgcatcgtgtccgctccgcttgggattgtgaggnaaagcgtgatggcagcgccgccggcnaagggctcgagcccgactacgactacctaatcaaactgctcctcatcggagacagcggcgttggaaaaagtngcctctgttacggttttcagatggat

SEQ ID NO: 5757 - DNA, 240 bp, Zea mays
  misc_feature: Incyte ID No: 700382287H1
  unsure 7-8, 16, 33-34, 69, 95, 112, 122, 134, 144, 146-147, 164, 221, 232, 234: a, t, c, g, or other
gtagttnnaccaccancaaccgtggataagcanntggtagttttaactttatttttatttgtttagctnactttaagttggagcaatattttacnattgaccatttcattcntcactgtagnctttgaagaggnactgtaaatnanngtggctaacaagtcganatacatgcctgcctcgtagtggaaggtcgtagctctccaatactacgtatatgtgantgcagtggtcnanattttg

SEQ ID NO: 5758 - DNA, 240 bp, Zea mays
  misc_feature: Incyte ID No: 700382290H1
  unsure 153: a, t, c, g, or other
atggacgtcaaccagcacgtgaacaacgtcaagtacatcggttggatcctcgagagcgtgccgctggacgtgctggaggattaccacctgacgagcatcacgctagactaccgccgggagtgccgtcagtcgcagctgctcgagtcgctcacnagcatgacgacctcgtcgtcggcgccggccgagccgccgctgacgtcgagcctgtgcggctctgacctgtacagcacacacctgata

SEQ ID NO: 5759 - DNA, 112 bp, Zea mays
  misc_feature: Incyte ID No: 700382291H1
  unsure 6, 16, 20, 24, 62, 71, 76, 81, 83, 87-89, 96: a, t, c, g, or other
cctgtnctgccctgcntttncccncgcatgctctcgctcgctctctcgttctcgtggttctnccgagtccngtgcngctcnantgcnnngactgcntctctagtggcgacga

SEQ ID NO: 5760 - DNA, 311 bp, Zea mays
  misc_feature: Incyte ID No: 700382295H1
  unsure 39, 51, 85-86, 88-89, 92-93, 242, 274, 280, 297, 302-303: a, t, c, g, or other
ttctcaaacccggtatggtggtcacctttgctccagtcncacgttacaacngaagtaaaatctgtcgaaatgcaccatgaagctnngnntcnnagctcttcctggggacaatgtgggcttcaatgtcaagaatgtgtctgtcaaggatgttcgtcgtggcaacgttgctggtgacagcaaaaatgacccaccaatggaagcagctggcttcactgctcaggtgattatcctgaaccatccangccaaataagcgccggctatgcccctgtattngattgncacacggctcacattgngtgcnngtttgctg

SEQ ID NO: 5761 - DNA, 252 bp, Zea mays
  misc_feature: Incyte ID No: 700382296H1
  unsure 21, 29, 37-39, 52, 102, 107, 130, 141, 143, 158, 177, 192, 205, 226,: a, t, c, g, or other
tctctggtggcgacgactggncggccgangctgccannnccctacgccaagngaccatgtctttcgtattcgggatcttgcgcccggcgtcgagcacccggncattngcggaaatttgatgagttagagnttagtactggncncatactcctatacgntgtcactggaagttcccanttccgcaagggcttngcctcttaagaantgttggatggtttgaggaccngaangttgatttcancagccaaacag

SEQ ID NO: 5762 - DNA, 300 bp, Zea mays
  misc_feature: Incyte ID No: 700382301H1
  unsure 72-88, 285, 295, 300: a, t, c, g, or other
agctccctgggccgaacaattccggactgggctaccgccgtccaccgcagccactttcgacccgagtgcgtnnnnnnnnnnnnnnnnntccggcgactgggcagtgagctaccgccgccgccctacgccaggtgctgaggtcttcgtcgatctcgagctcccacaagggaagctgtccaggatgggatacaaccgccacaggcgtgcccggggatcatcctcatcgtcttcgcgccgcaccaagcaagaagcctcgtgtgatgatgacttgggacatcatttcanggcaagaagnagcan

SEQ ID NO: 5763 - DNA, 290 bp, Zea mays
  misc_feature: Incyte ID No: 700382302H1
  unsure 277, 287: a, t, c, g, or other
aacacaaccacaaggagcaagaggtagacagagctgctcgctgagagtgtgctgtgctttgctcatcgaccgaccgatcgatctcggcatggcggactgggggccagtgctgatcgggctggtgctcttcatcctgctctccccgggcctgctcttccagatccccggcaagggccggatcatcgagttcggcaacttccagaccagcggcctctccatctcatccacgccgtcatctacttcgcctcctcgcatttcctcctcgccgtgggtccanattactcggnact

SEQ ID NO: 5764 - DNA, 294 bp, Zea mays
  misc_feature: Incyte ID No: 700382305H1
  unsure 54: a, t, c, g, or other
tcggttgcacagttgctgctgtttctgcatccaatctgccctcacgtaaatggnccaagaggtatccgataaaactggaaagcaaggaatctggtatttgcagggggagcaaggtatgctatgtttatgcagacacctcttgggagaaggaatcatggtgtaaagcactccgtcttgcttctactacggacaaggacaaactcaaatcccatgaaatgctgacccaagagttccgcagttacatgtctctctgaaagctggatacccttctttctgggaccctcgacactctcc

SEQ ID NO: 5765 - DNA, 295 bp, Zea mays
  misc_feature: Incyte ID No: 700382306H1
tcccaacacccatgtctgccacggaaaaattgtcgattcatgatggtactccacttggtccagaggatgtgaagacttataggagtattgttggtgctcttcagtacttatctcataccaggcctgatcttgcgttcgcaatcaacaaagcttgccaatatcttagcgctccttcaaccgtgcactggacagcagtcaaacgaattctgagatatgtcaaaggtacactccgcatgggtcttaaattttgtcgatcagcatctcttgttgttagtggcttctccgatgctgactg

SEQ ID NO: 5766 - DNA, 293 bp, Zea mays
  misc_feature: Incyte ID No: 700382307H1
  unsure 9, 188, 190, 232: a, t, c, g, or other
ctgtatgcnagtattatttgaagactgggacttgtaaatttggttccaattgcaaatatcaccatcctaagcaagatggatctgtgcagtctgttatattaaacaacaatggattccctctacgtccgggtgagaaagaatgctcctactatatgaagactgggcaatgcaagtttggttctacatgnanatatcatcatccagaatttggtggtattccggtaacccctgncatatatccagcattacaatcagcatctgtgccctccccccttacatatgcttcaaattgg

SEQ ID NO: 5767 - DNA, 279 bp, Zea mays
  misc_feature: Incyte ID No: 700382311H1
cagatcggtagcgggaagggctatgtggacatgtccactgttgacgctgcaacttcgaccaagattagcgaggcagttaaacaaaaagggggagctttccttgaagctccagtttcagggagcaagaagccagctgaagatggccaattggtcattcttgctgcaggggacaagccattgtatgatggtatgattcctgcatttgatgtactggggaagaagtcattctttctgggagagattggaaatggggcaaagatgaagcttgtggtcaacatg

SEQ ID NO: 5768 - DNA, 287 bp, Zea mays
  misc_feature: Incyte ID No: 700382312H1
  unsure 57, 69, 74, 93-94, 98, 137-138, 141-142, 149, 152, 167, 170, 181-182,: a, t, c, g, or other
aagaaacacatatccatctctattctcatttccctgtgttctagtgttcctcttctntgtctagaaatntatanttctcttttcccttcatcnnacangtacccagattctcttatattctagtactttgctgctgnnggnngaattgnggnattagtgttggtaanatntggtatcagannaggtcatctggacgcgggctctgctgtggcgtccacgatggnctccgtggaggcggcgatgaagtgtattctcnacgcgctggcgcnaacgnncgaangcnngnt

SEQ ID NO: 5769 - DNA, 283 bp, Zea mays
  misc_feature: Incyte ID No: 700382313H1
  unsure 42, 56, 64, 66, 76, 99-100, 102, 104, 111, 115, 128, 167, 181, 188, 208,: a, t, c, g, or other
cgtgacaggcaccggctgagagagagggaagtggaacgagancggaggagccgganccgctcgnancggcgccgtnccgaggaagaggagatggttagnnancncggagcnggancgcgagcgcagcngcaccatcactatcgcgaccgtgatgtcaggcgtagganagatgacggggcanagcaganttgatccagaaagggaccanaggactgtattgccttcnagctatctgtgaaggcagacgataganatgttatgantccttctcaagggtgggaag

SEQ ID NO: 5770 - DNA, 290 bp, Zea mays
  misc_feature: Incyte ID No: 700382317H1
  unsure 162: a, t, c, g, or other
tcggcttcgtttgtcgtcgtcgtaagctgcagctagtgtggactggagatccaccactccaccagtccggtccatctgctggacctcgattggtttcttcttacctaggaacatccggggatgtcgactcctgcgaggaagaggctgatgagggatttcaancggttgatgcaggaccctccggccggcataagtggcgccccgcaggataacaacataatgctgtggatgctgtcatatttggactgatgatacccgtgggatggaggtacttaagctgactctcagtt

SEQ ID NO: 5771 - DNA, 295 bp, Zea mays
  misc_feature: Incyte ID No: 700382318H1
gagaacaacatgggggatgtcgacatgatctcagttgaagggtcttcagaagctgcaaagggcaagtcccaagtgaagttcagtgtgaagaaaaactcaagaatacagataaagagattaaagggcaaaggcaggaagaaagccaaaaattcaaaaccacctgccaaggagagagttgatgccatggtagaatgacagttgatgccatggtaccatgacggacaagactacatacatccctttgtatgttttctcagagttgcagcatggaccgactcaccgacactggcgcgtg

SEQ ID NO: 5772 - DNA, 294 bp, Zea mays
  misc_feature: Incyte ID No: 700382321H1
  unsure 18, 40, 82, 88, 139, 151, 186, 192, 202, 225, 232, 236, 265, 288, 291: a, t, c, g, or other
cgtgataggggctactcncctaagaccaattcctcctggnaggccactcacaatctcacagcaggaggcagctaaacacaanatcaanattaatataaaatcaactgctatatttttaaagagtagtgtttggattacntaagcaatcatnaaactcccgttggctttagcaagaggtttagtccngtaaantccaaaggtnttctgtgtgtgctgagcagacangcatccnagcngagtaagccagaactttcctagccatccnagcatgtttgtgccttgtaaganatnccc

SEQ ID NO: 5773 - DNA, 288 bp, Zea mays
  misc_feature: Incyte ID No: 700382323H1
  unsure 14: a, t, c, g, or other
cccgaactaccgancccccttctcgccggcggaggaaggcgggggctgagaaaagagatcacggtcgctaatccgtgacggcagtggttgggatggcggcggcgctagtccgggggtgtcccggaagttgaagaaagtgctggagacgcgtacggataacccggatctgctggcctcgctgggcgctctctccactttctacgtccagaacatcccgcaggcgcgccgcaatctcaagtcatccattgagcagcgcgcacttgccatcaatcgccattcctcgacgct

SEQ ID NO: 5774 - DNA, 291 bp, Zea mays
  misc_feature: Incyte ID No: 700382324H1
aggtgatccatttcacaagaggaagaggacaggaggtcggaacaggaactgtcgtcgatattattcttgtgagttccaccccaaaacgaagcaacacgccttgcccggtgtgcaccgacgaaaccagcgacagcagcacagagacgaacggcgtggtatcctcctgtctcagctgcttcctagctgggggtgctctctaccgtttcgagtacgcatcaacccggcgctcttcctcgccaaagcgcgaggagggacgtgcacgctcgctccctctgaccctgacgacacggt

SEQ ID NO: 5775 - DNA, 288 bp, Zea mays
  misc_feature: Incyte ID No: 700382325H1
  unsure 29, 202: a, t, c, g, or other
cggcgttcgcgccgctggtctccgcgcantgctctgcagatttctacaagacgtcgtgccccgacgccgagaagatcatcttgggcgtcgtcgagaagcggttcaaggcggaccccggcaccgccgccggcctcctccgcctcgtcttccacgactgcttcgcaaacggctgcgacgcgtccatcttgatcgaccccatgtngaaccaggcctccgagaaggaggcgggccccaacatctccgtcaagggctacgacgtgatcgaggagatcaagacggagtggagaa

SEQ ID NO: 5776 - DNA, 285 bp, Zea mays
  misc_feature: Incyte ID No: 700382326H1
  unsure 135: a, t, c, g, or other
ggaggatagggaggtcgggtgtgtggtgggttaagagtctggatactgtaggcttcatctgggtctcatgcatatatatgtttgtctctgggctcaggagaggtggccttcccaggatagggggaagaagagggngtgacacctggctgtttgtatgagttaggaacagagatagcagtcagcaacaggaaagctcaaagtagggctttatcctttgtgatggtttgaatatgggtggtccaggaagtggcattattaggaagtgtagctttgctggagtaggtg

SEQ ID NO: 5777 - DNA, 288 bp, Zea mays
  misc_feature: Incyte ID No: 700382327H1
  unsure 2: a, t, c, g, or other
gncacaggcaactatgccagtgcactgttcctcacagcagctaaatctaatgcattggacaaagttgaatctgagattaaagactattgtagaggcttccaagaagagcccgttgttttctcaattcataaaggacttgtcagttccaaaagcgaccagggtgaaggctatagccgaaatatttgctgacgctgggttttcagatgttacaaagaatttcttggctgtcctggcggacaatggcaggctgaaatatattgaacgcattgcggagagatttgttgattt

SEQ ID NO: 5778 - DNA, 284 bp, Zea mays
  misc_feature: Incyte ID No: 700382330H1
aagtgtctcgttaactgaactggatgaatgtacttctgaacttctaagaagtgttgtctctacagaggacattatcctctccatgtctggaagaaagaacccacttgcttcagattcacttgtgcctcgaaaagtaagtcacataaaagtgaattttggggatgaaggtcctctaggacaggtgaagtacactgtgatttgttactatgccaaacaatttgatgctctgaggagattatgctgtccatcagagcgtgattttgtcaggtcccttagtcgttgca

SEQ ID NO: 5779 - DNA, 286 bp, Zea mays
  misc_feature: Incyte ID No: 700382331H1
  unsure 43-44, 193: a, t, c, g, or other
ctactctctaggcatctggataatcttcttctaactgatgatnnacgcctttttcatgttgactttgcttttatccttgggcgagacccaaagccatttccgccaccgatgaagttgtgtaaggaaatggttgaggccatgggtggtgcagaaagccaatattacacaaggttcaagtcctactgctgcgaanatacaacattctgaggaagtccagcagtctcattttgaatctattcaagctgatggagcgatcaggcattccagacatctctgccgatgaaag

SEQ ID NO: 5780 - DNA, 287 bp, Zea mays
  misc_feature: Incyte ID No: 700382332H1
actagttctagatcccgtgcttgtcggtggcgcacaagggactggagtaaatgctacattcttctgtagagggtatcctcggatcaatggaatcatctcaatattattcaaagaatagtattgatgtggctcgagggagagggtacaagattgtgatgacaatcagcctttcttcacacgtcccagttggctactcttcatgggctgaatatgattgtaacaccctcaatttggggtataaaatttcttttctaatatccaccaaatttaggtgttactctctcaaa

SEQ ID NO: 5781 - DNA, 290 bp, Zea mays
  misc_feature: Incyte ID No: 700382334H1
ccaaagccaaaagtcaaaccaaacacaccctaagtactgaactaagcaaatcttgttgcagtccgcacagctttggtagccttgattgccttcatgccgacgaacccaggtggggcattgggctcactggattacaaaccagaagacagacgagcacttgctataaaatcacgtgaggtgccgccgaaatttggctccccacaacgtcagaaactaattgatgagatccatgagcaaatgctcagtaaggctctctatccccaaacgctgcaaatgtgcaaacgaggagt

SEQ ID NO: 5782 - DNA, 291 bp, Zea mays
  misc_feature: Incyte ID No: 700382335H1
  unsure 13, 20, 25, 39, 44, 62, 93, 110, 113, 122-123, 164, 203, 228, 246, 251,: a, t, c, g, or other
ggaagcagaatanttgtcancacanggtttcaagctgtngccangacatgctctgcacatanagatcaagatcatattcatttggttgatgtnctttccggtgaagaggncancagtttatnnatcaaaaccttttccgagtgtataggtaatagtgccagacnatcataccagaccaaggtgccagacagagtttggcagangtgtggtggcttgccgttggccatngttaccatggcaggagtngtggnatccaagcnactgatgatcagagatgatggnttgccgtnt

SEQ ID NO: 5783 - DNA, 205 bp, Zea mays
  misc_feature: Incyte ID No: 700382336H1
  unsure 73, 181, 184, 189-190, 192-193, 196-197, 204: a, t, c, g, or other
gattaatattacattatatccatgttccaattattatgttatgttattgatttccaattaaagataatgatcntgacatgaacataaataacataacataataattggaacatggatataatgttatgttatttatgttcatgtcaagatcattatctttaattggaaatcaatcaataanaanatgannannaanncgccaang

SEQ ID NO: 5784 - DNA, 288 bp, Zea mays
  misc_feature: Incyte ID No: 700382340H1
gcgggtctatggaattactatagattgataacagtactgagaaataccatccgttgtaattcattgtaaatttgaggcatagtgatgctgtttgtagataggtatttgaatgtcggaagaagtacgtctcacggggccgacatttcgtaacccctgtgccaggtcaatccattcttgcggagcctttgattgcagttttagacaagagctagccagatgttttctttgtagctactatctgaagggctaattagggttgacaaatttcgccgtactgtattagttttc

SEQ ID NO: 5785 - DNA, 282 bp, Zea mays
  misc_feature: Incyte ID No: 700382343H1
  unsure 277: a, t, c, g, or other
cgcgcatcttgcaggctggcacgcaggcctagcttctctctgattccctgtagtgagctgtgctttgctttgcggccatggtttgcttgcgagctaatggattggccgtcaaggatgcctctcccttttcgctgttcgtggtcaccaactgccactgactgttggatcatccgtcagactgacgaaacgtgaaacgcattttgcaccgtcgcttggttaacaaatcatcgtcaaagacactgaaatgactggtctaaatatacatggggattaatgnttagg

SEQ ID NO: 5786 - DNA, 283 bp, Zea mays
  misc_feature: Incyte ID No: 700382345H1
attatcagaaatgtgttaaaaggattgaggacgatgagactgggcacaagcactgtaccggtcagtactttgattactggaaatgtgttgacaagaatgttgcagagaaactctttgagatgttaaaatgacaaattttccctccatttatccacttaaagttggtaataattgtatcacttgtgaggcctatagactattaaggcacttaatatttgtcagagaacttttgcctcttgggtaacacaaattttccactgccagtttgcatttcatttctgct

SEQ ID NO: 5787 - DNA, 281 bp, Zea mays
  misc_feature: Incyte ID No: 700382346H1
gatcgcgtcagatgaaaagattgcattactgggagccatacagtcactgtttgagggctccatgtacacatttgtcttcctatggactccagcattgagtccaaatgaagaggacattcctcatggttttatttttgctacattcatggtgtcatccatgctgggtagctccatcgcgtcacgtctattagcccgaaagctcaaggttgaaggctatatgcagatcgtgttctcgatatcggctgtcacccttgtcctccctgtcgccaccaacatcttag

SEQ ID NO: 5788 - DNA, 284 bp, Zea mays
  misc_feature: Incyte ID No: 700382348H1
  unsure 193: a, t, c, g, or other
aaaccatgatggttcaactgggctgagtactgacagcttagtggaagcgggttatcctggtgctgctgcactccgtgaagtcgtgtgtggcatggtggccattaagatctcttccaaaaattttatcttctggttccgatcacacacaacaaaggagatcaagtggagtggggctaagcatgaaccgtttgangcagatgacaatggcaggaagatgcatccacgatcttcattcaaggccttcttggaggtggttaaatggagaagtgttccctgggaggatg

SEQ ID NO: 5789 - DNA, 293 bp, Zea mays
  misc_feature: Incyte ID No: 700382349H1
atccgcctccgcctccgcctccctagggttttgctctcggctcgtcggatccagttcgggggatcctccatggcgtcgcgtccgtcgctgaagtcgaagcccaagggcaagggcgggaagaaggccaccgctgacgacgaggacgccaccgcggcggcgaccacggtgaggctcatgaaggagtggaccacgtggacgatgaagaaggcgaagtggtggcgcactacggcttcatccccctcgtcatcgtcatcggcatgaactccgagcccaagccctccgtcttcaagctc

SEQ ID NO: 5790 - DNA, 289 bp, Zea mays
  misc_feature: Incyte ID No: 700382351H1
agccatatttgaaacagttaagaattcatatataagagtgcatatatatatataatcctgccaagacaaaggtaatggagtcgtcacgcatgttccagccggccatcatcctgcttctcctgctcattgtgaccaccgatgtggcgcaggcggcgagggaatgcgagaaggacagcgagcgattccttggggcatgcatggcgtcggacaactgcgccaacgtgtgccgcggtgagggcttctccggcggcaggtgcagcacttccgccgccgctgcatctgcactaag

SEQ ID NO: 5791 - DNA, 224 bp, Zea mays
  misc_feature: Incyte ID No: 700382352H1
  unsure 10, 13, 25-26, 35, 69, 72, 76, 80, 98, 112, 119, 123, 150, 155-156, 165,: a, t, c, g, or other
agtgcctggngcngagctgaacagnnacgtctganagaggagttggctagtgttgttgccaagttggtnganagcnaacnaaaactggcagtactganagcacagggagacnataagcnagcnacaccgatccttgttcctatgctgggnaagannactgcaganaaggtgggagataaacanacagnactgcnagatcttgangctacccacaaggagttnnt

SEQ ID NO: 5792 - DNA, 286 bp, Zea mays
  misc_feature: Incyte ID No: 700382353H1
  unsure 46, 186: a, t, c, g, or other
cactgactcgtctcccttctcgtctccagcgacggcgaaggcgaanggaggagcgggagcagaaacagaagaggcagccatggccgtgatggagaagctcaagatcttcgttgtgaaggagcctgttgtcgcagcttcctgtctcatcgccggattcggtctctttcttccagcagttgtccggcnaatcctggattcatgggagaccgcagaaaaagttcctccaccacctctaaatgatgtggttgcgggtgtcaccggcaagaaaaagtagtgaacttgcatt

SEQ ID NO: 5793 - DNA, 287 bp, Zea mays
  misc_feature: Incyte ID No: 700382354H1
aacaatcatatatatattgttgcttaaagagaagagaagatcgacaagagattggcggtaatggactcctcggagctgcacatactggccttgcagagggtgaagcaggtggagccggagaacgcgagcaagatcctcggctgcatcctcctggaggaacccgacaaccaggatatgctgcagctcgcctacggcaacgacgccgaggtgcacgccaagatcagccacgccaaggccatgctggacgccatcgtcgcgtgctgtcctcgccggccttcggctaccat

SEQ ID NO: 5794 - DNA, 286 bp, Zea mays
  misc_feature: Incyte ID No: 700382355H1
  unsure 277: a, t, c, g, or other
aggacgtgaaagggtatttttatcactggatatgataaataagaaacagatgcattaacctgactctttctctgaaaaaatgaataatgatcatggatggtttagcccactttgggttgcatttgcaatcctgattggtggtctcttattggatgtgctgatatctgtttctcttggtgtttccgcacttcctgtcaatataataattggcgttcttatagttctcggattgggcaccgcccttcgtcttgctctcgagtgctgccaggaatggggntcaaggagg

SEQ ID NO: 5795 - DNA, 285 bp, Zea mays
  misc_feature: Incyte ID No: 700382356H1
  unsure 241: a, t, c, g, or other
ctggaataggggatcgagatgcttctaaagtttctgtgaagaaagaggaagcagcaaacattaagatagttgagctgcaatgcatagatggtctgggcagttcagccggccattcctctttggattattgaatgatgggacattgttgtgttatcacgcatattattttgaaggctcagaaagcaatgtgcaatgtgctcctttctcacctcatggtggttcaccggatattggcaatgcnactgattcaagactcagaaatttgagattttgtcgagtttcaat

SEQ ID NO: 5796 - DNA, 285 bp, Zea mays
  misc_feature: Incyte ID No: 700382357H1
  unsure 80-110, 157, 194: a, t, c, g, or other
agcgagcgagatccccctctcgcgctgctggatccgatctgacctgaccttacctcgtcgccgccagccgtgagagagannnnnnnnnnnnnnnnnnnnnnnnnnnnnnncaccggtgtcggcgctcgccaagtacaagctcgtcttcctggggganactccgtcggcaagaccagcatcatcacccgcttcangtacgataagttcgacaacacttaccaggctacaattggtattgatttcctgtcaaagacaatgtaccttgaagatagaactgtgagactc

SEQ ID NO: 5797 - DNA, 282 bp, Zea mays
  misc_feature: Incyte ID No: 700382359H1
gcctctacgagcctgtcaaatccttctacgtcggcaaagaccacgttggggatgtccctttgtccaagaagatagccgccggcttcacaactggtgccatcgctatcagcatcgccaaccctactgaccttgtcaaggtcaggctccaggccgagggcaagcttgcgcctggtgtgccacgccgctacactggcgcaatggatgcttattccaagattgctagacaggaaggggttgccgctctgtggactggccttggaccaaatgtagcgcggaatgcta

SEQ ID NO: 5798 - DNA, 156 bp, Zea mays
  misc_feature: Incyte ID No: 700382361H1
gagattactctctaagaaactgatccgatattaagacactataattggcattggcactagtagatcgtttactgagtaatgcagtttattttaatgtatcccaattgtgttgtaagatacaactatgcgtcggaattacccattcaatttgaatct

SEQ ID NO: 5799 - DNA, 131 bp, Zea mays
  misc_feature: Incyte ID No: 700382364H1
atcatgccgctgttcccttcagtggaaattaactgataggaagaccagtgatttgcggagactgtaaaaattgttccacatagatctatactatttcctaaaaggagtttatgacagggacaatattctcc

SEQ ID NO: 5800 - DNA, 289 bp, Zea mays
  misc_feature: Incyte ID No: 700382365H1
  unsure 101, 151, 184, 263, 265, 272: a, t, c, g, or other
agaatgcttcatcagtgccacatgcccaaccctcaccaccaagtgtagctccagaattggcacccactggtagatctcatgctcagggatggaaatccagnaatcccaataacaaaacaaatagattacctgccccatcttatccaccgcntcgtgctcaagggcccgaggtctcacaaagccnaagacagactgggactaaaaactatactcaccatgcgcctccacgattccctcaaggacaccctagctttctgtacacncnccatccncttcacaagctcatcgg

SEQ ID NO: 5801 - DNA, 285 bp, Zea mays
  misc_feature: Incyte ID No: 700382366H1
  unsure 191: a, t, c, g, or other
aggatggacataatgaaggagtaactatggctggatatggttatgggatccctattagtcgcctttatgctcgatatttcggtggggacttgcagatcatctctatggaaggatatggaactgatgcttacctccacctttcacggctgggagattcggaggaacccttgccgtaatttattcaaaagaancattcctgtaattaggatattgcttctgtgctggtatgcaagtatagttctgaaggccagccaactgtcagtgttggtgtcctacttgttgctt

SEQ ID NO: 5802 - DNA, 268 bp, Zea mays
  misc_feature: Incyte ID No: 700382367H1
  unsure 43, 254: a, t, c, g, or other
ctgctcgccggcccaaaatcgcctacatcgaccacgcccccanccaggctcccgtctccatacggtctcctctcaaacaggattgggagggagagcctcaaggcgggggatcatatctactcctggagggcggcgtgggtctacgcgcatcacggaatatatgtgggcgatgataaggtgatccatttcacaagaggaagaggacaggaggtcggaacaggactgtcgtcgatattattcttgtgagttccacnccaaaacgaagcaa

SEQ ID NO: 5803 - DNA, 283 bp, Zea mays
  misc_feature: Incyte ID No: 700382373H1
  unsure 5, 8, 72, 84, 138: a, t, c, g, or other
agatntcntcggtgctagagaaatataggccgccgcctcctcctcattcggtgaaaggtgggcggttagggntgggagatctcntgactcacgacacgagcagcagaattcgtcgagggccgctggttgctgcgagangtccgggccttcgtgggatcttgaaaattgaatgttctaatggagtccaagggtggcaagaagaagtctagcagtagtcgttcctccctgatgtacgaagctccccttggctacagcatcgaggatatccgccctgcaggcggca

SEQ ID NO: 5804 - DNA, 282 bp, Zea mays
  misc_feature: Incyte ID No: 700382374H1
tgaagccgccgccgctgcagtgtccatagccaccgcaggaggactgagatggggggttttgtcaagacacacaagagcaatgcatacttcaagcgtttccaggtgaagttcaagagaaggcgcgctggcaagacagactacagggccaggataaggctgattaaccaagacaaaaacaagtacaatacacccaaatacagatttgttgtgcgatttaccaacaaggacatcacagcacaaatcatatctgctagtatagcaggtgatatggttcttgcttct

SEQ ID NO: 5805 - DNA, 281 bp, Zea mays
  misc_feature: Incyte ID No: 700382376H1
  unsure 19, 45-47: a, t, c, g, or other
ctctttgatctgcatattncttcatacttactgcaacatttgaannntgcagatcaaagagcagtttaaaaaaaagcaaaaagaaggaaacaaacggtttagtcccctatgcagcaacgagcaatgacgtgacacccagtagttgcagcttgtcccgagcaacgacattcattgtgaggaagcggtccacgtaggaaaccgcaaggtggagtgtttctgcgtgaagcttgaattctttagccacctccaccaaccagtccacaaggacagccctcattttg

SEQ ID NO: 5806 - DNA, 276 bp, Zea mays
  misc_feature: Incyte ID No: 700382377H1
tgacagatcgtttggtggattaagctttactaccacagatgtgggcaatgtccttgcgatgtcaggtctcttccttttctatatcaaatgttgatctatccgttccttgccaaaacggtggaccacatcacattagtccgtgcagtggcgttattgactctaccggttcttgctagctacccattctttccttcgttgtccgggttcgggctcatggtggtagtaaattgtgcatcttttctgaagaatacattctcggtaactaccattaccgtg

SEQ ID NO: 5807 - DNA, 272 bp, Zea mays
  misc_feature: Incyte ID No: 700382381H1
  unsure 36, 39, 173, 179, 192, 198, 203, 205, 214, 228-230, 238, 248, 250, 256,: a, t, c, g, or other
cctggcctcagatgaagcccaaccattcattggtanatnagtcgctacaacctttgcaatttcccactgcttcagaacatcgtcgaagaagctctgtgctaccggagaaggtgttcgtcgtcgtgcataattatacattccgcagagctgtaagctctgtgagttggttggantcccanggtctgcatgcgntgagantgggngnattcttgcngtacaagcagagcnnngaaagggncttgtccccnangggttnaaatcnggatccatac

SEQ ID NO: 5808 - DNA, 281 bp, Zea mays
  misc_feature: Incyte ID No: 700382382H1
  unsure 7, 74, 78, 116-117, 248, 276, 278: a, t, c, g, or other
gccagtncccccgcgccaatgccggatccggccggcggcgccgggctggcatgttccctctaactgcccctgtncgcngccgcggctcccgatgctcgtgtggtcttcgggagcannagagggagcagcggccgtcgtgggcggcggctaggagcgaagatgcagatccggtgtcgccgagcatgaggagcatcaccatctccatagccatggcctgctagacttgatgaggctcaaggtcgacgcgngacacttttctaccgcaacgtctccaanangtc

SEQ ID NO: 5809 - DNA, 281 bp, Zea mays
  misc_feature: Incyte ID No: 700382386H1
aaggattgagaatgtctacatcgagaaccaatgtcagtggcacacgccgccagtctattggtggtgctgatggtttgtctaaggccaacggcttcctgtcaaaacgcccatcattccagatgagatcatcagtgtctaccacaacgactctagtgaaccatgcaaaaggagcgtccaagtcgtttgacggaggctgtagatcacttgaacgctataagggccatgtaaacgggaatggtatgaacgtatctaccgattccagtgaagataaagattcaaac

SEQ ID NO: 5810 - DNA, 280 bp, Zea mays
  misc_feature: Incyte ID No: 700382387H1
  unsure 95, 180: a, t, c, g, or other
ataaaattccgagattttacttgatacaagtggaacactcagagttttgtgcgaatacttcctaccatgtgaatcagttgtagctggtgaatttngcaagactcaatttctctcatctgagttcagaaacgtttgcttggtctcctgcttcccttgagtcttgccaaccatagttttctntcatctctttctgtgacttgaccatcatctcttttggtcctgtcagtctcgcaatactcccttccaaagacttgtctagaggttggattgcctgctctct

SEQ ID NO: 5811 - DNA, 218 bp, Zea mays
  misc_feature: Incyte ID No: 700382388H1
  unsure 13, 17, 28, 32-33, 39-40, 74, 79, 87, 116-118, 120, 137, 150, 155, 175,: a, t, c, g, or other
caccatccagaanatancataacatcancccnnaacagnnaacaacccattgacaagccacaccgcacaccttncatancaagaggnacttggtcagtccactgatgacatatggnnnanatcaacatgcaaaccgnttaaatgtgctcnggtgnacagtaacccagcaagaagnatcctcataactacncncntacgtgaantagcnnnaaagccac

SEQ ID NO: 5812 - DNA, 278 bp, Zea mays
  misc_feature: Incyte ID No: 700382389H1
  unsure 16-18, 48, 184: a, t, c, g, or other
ttgaagagtgcaagtnnnctgcttctcttttgaaagaagctatacatntcattagttgtggttatgaagacaagacagactggggaaaagagattggctggatctatggatcagttacagaagatattctaactggtttcaagatgcattgtcatggttggcggtcaatttactgcatacctcnacgggttgcattcaaaggttctgcacctctgaatcttcagatcgtcttcaccaggtgcttcggtgggctcttgggtctattgagatcttcttca

SEQ ID NO: 5813 - DNA, 257 bp, Zea mays
  misc_feature: Incyte ID No: 700382392H1
  unsure 44, 208: a, t, c, g, or other
agctcctcctcgcgattccaatccaccgcacgcctcctccgacntccgcctcgctcaggcttaacagtcagtgatggaacacaaggaggcgggctgccagcagccggagggcccaatcctatgcatcaataactgcggcttcttcggcagtgctgcgacgatgaacatgtgctccaagtgccacaaggagatgataacgaagcaggancaggcccagctggctgcctcctccatcgatagcattgtcatggcggtga

SEQ ID NO: 5814 - DNA, 276 bp, Zea mays
  misc_feature: Incyte ID No: 700382393H1
  unsure 50, 128, 186: a, t, c, g, or other
accgcaccgcggccacagcctcgcgtcgtcgccccacagccacgcgagcnttcgccgatccgcgagcgcagattcgccgaagccaggcggcggagagggagctcgaggacgcggaggaaggcgttcgnaacagtcgctgatttccctggggaagagatgggtctctctttgggaagctgttcagcngcctcttcgccaagaaggagatgaggattctcatggtcgggctcgatgccgccggtaagaccaccatcctctacaagctcaagctcggcg

SEQ ID NO: 5815 - DNA, 277 bp, Zea mays
  misc_feature: Incyte ID No: 700382395H1
atatcgtcgaagaatctcgaaagctttgggtgcactgctctgctttatatgtcataacaatctcagcctgcattcttcttttccacgaatacaagtatatttcgaggaagagactagcacatgttactggatatcctccaaatcctggcctttttaccgtgcttgtccgttcgattccgaggtttgacaatgagctgcttgatgacacaatcagaaatttctttgttaactatcacggatcaagttatctgtcgcatcaaatgatctttcgcaaggg

SEQ ID NO: 5816 - DNA, 279 bp, Zea mays
  misc_feature: Incyte ID No: 700382396H1
cgcaaatgacgttggagacgcataaggatggcaccaaacccactgaaagcagaaagttaaataaggaaagggaaattactgaaaatggtagtccaattgtcgataaacacattgttgctgctccagcagaagaggcagtcacaagcctaaataagaaagcctctcagaacatgcccttgcttccacatggtttgaggaacacaggaaatatttgctttctgaatgcaactttgcaggcattgctttcatgctcgccttttgtctaccttttacaggatt

SEQ ID NO: 5817 - DNA, 107 bp, Zea mays
  misc_feature: Incyte ID No: 700382401H1
  unsure 36, 53, 56-57, 70, 102: a, t, c, g, or other
ccccactccaccttactaccaggcaaccttagccanaccatttacccagatanagnntaggcgatagaangtgaaacctggcgcagtagatgtagtaccggnggggt

SEQ ID NO: 5818 - DNA, 306 bp, Zea mays
  misc_feature: Incyte ID No: 700382407H1
  unsure 282: a, t, c, g, or other
cctggatatgttatatcctctgatattgcaggttccattctatcggaatttttaaagcataaattaaggcttttcaaaatggaggatgtgagcatgggcatgtgggtagagcggttcaacaacaccagacttgttaaatatgtccacagcatcaaattttgtcaatttggatgcatagatgattattacactgcacactaccaatcaccaaggcagatgttgtgtttgtgggacaaactgcaggctggaaaagcccaatgctgcaatatgagatagcaggantggatgtggtggtactggtaagct

SEQ ID NO: 5819 - DNA, 305 bp, Zea mays
  misc_feature: Incyte ID No: 700382411H1
  unsure 32, 36, 87, 135, 141, 163, 201, 203, 223, 250, 259, 304: a, t, c, g, or other
atttttcccatcaggttatccatacagtgtgnatcncaggttacttaacttataccaaattccgtgtgctacagcatttctcgagtnctatggctacatgtgctatcaacacagtccttgctgtttgctgcagtntgcganctaaccccggcgcaagcaactnctgtaagttggattctaaaagatgaaatggcagacgcngnaaagctcatttgtagcagcntgggtgcaagaatggattctgaaccanagagttggnggatacttgctgatgttctctacgatcttggtactgcattggaant

SEQ ID NO: 5820 - DNA, 145 bp, Zea mays
  misc_feature: Incyte ID No: 700382415H1
  unsure 37, 74, 95: a, t, c, g, or other
ctgctatccttggatcgatctcgtctttgtcgttganttgcgcaggttgtcgatggccaggacatctttcaaantggatcacgaccttcgagaanaggcagtccgaatctgccaggatcagggataagtatcccgacagaattcc

SEQ ID NO: 5821 - DNA, 307 bp, Zea mays
  misc_feature: Incyte ID No: 700382421H1
  unsure 10, 18, 35, 37, 48, 77, 125, 140, 175-176, 179, 196, 203-205, 215,: a, t, c, g, or other
ggacaacaanaggactcnacattttattcttaacnangacttgggcancaaactccagggtaaaagactggaatgancccagctggttcaggtggagatgctgtttttttggaatctagtgaagncttaaatggtttcanactaaagcaggccatgagatggaacccttttcatnntcncagttcctcaaacacantgagatnnnccccacattncactcctttctggcanntgctcgaggtcatgtaaccagagtgagccnatttgnccgggctgacngctgatctggccttgannacctgccctg

SEQ ID NO: 5822 - DNA, 205 bp, Zea mays
  misc_feature: Incyte ID No: 700382422H1
  unsure 59: a, t, c, g, or other
ggagatttcagtacgaggatgaggttaggaagaatccactaaactacgactcatggttngattatatcaggctggaggagagtgttgggaataaggacaggatcagggaggtgtacgagagggccattgcaacgtgccccctgcagaggagaagcgatactggcagaggtacatatacctctggattaactatgcactctatgag

SEQ ID NO: 5823 - DNA, 155 bp, Zea mays
  misc_feature: Incyte ID No: 700382424H1
  unsure 2-3, 84: a, t, c, g, or other
annacgcggcgaccatgtctccgatctgggtgttcgggtacggctcgctgatctggaacccaggcttcgcctacgacgaccgcntctcggctttgtcagggactaccgccgcgtcttctaccaagggagcacggaccacaggggcacgccgcagt

SEQ ID NO: 5824 - DNA, 101 bp, Zea mays
  misc_feature: Incyte ID No: 700382425H1
  unsure 28, 41, 54, 74, 97: a, t, c, g, or other
aatgcgcgggcatgtattaggttgcgtntggcatgtgaganacttaagaaggtnctgagtgccaacccagaggncccactgaacattgagtgcttgntgaa

SEQ ID NO: 5825 - DNA, 131 bp, Zea mays
  misc_feature: Incyte ID No: 700382426H1
  unsure 104: a, t, c, g, or other
gccggacacgctgcacgagggcacggtgctgatcccggggatggggcgctacgagatcggcagccactacatcccggacatcggcgggctggaccacagcgtcnccgccgccacccacgggcagtacatct

SEQ ID NO: 5826 - DNA, 130 bp, Zea mays
  misc_feature: Incyte ID No: 700382427H1
  unsure 12, 16, 31, 50, 55, 66, 74-75, 95, 101, 127: a, t, c, g, or other
ggatgatgtctncctnagtgttccttgcatnttgggacagaatggaatcncagancttgtgaaggngactctgnnttctgaggaagaggcccgtntgaagnagagtgcagatacactttgggggagncca

SEQ ID NO: 5827 - DNA, 300 bp, Zea mays
  misc_feature: Incyte ID No: 700382428H1
  unsure 70, 120, 150, 155, 163, 193, 210, 260: a, t, c, g, or other
taaaaagttgtggcaaagatggcttccatatccgggtgcggctccaccccttccacgtcaaccgcatcancaagatgttgtcctgtgctggggctgacaggctccaaacaggcatgcgangtgcctttggaaagccccaggggcactgtnggccngggttcanattggccaagttatcatgtccatccgcacnaagctgcagaacaaggngcatgtgattgaggccctgcgcagggccaagttcaagtttcctggccgcnagaagatccacatctcaaaggaagtggggcttcaccaagt

SEQ ID NO: 5828 - DNA, 114 bp, Zea mays
  misc_feature: Incyte ID No: 700382430H1
  unsure 8, 21, 39, 48, 77, 95, 99, 103, 107, 109-110, 113: a, t, c, g, or other
gcaacgcntgaagctcaccgncacctaccctcctacgcngcggatccnccactgacttccggtagaaaatggctgancgctgaggatatccagcncctngtantggngnnagnc

SEQ ID NO: 5829 - DNA, 128 bp, Zea mays
  misc_feature: Incyte ID No: 700382431H1
  unsure 36, 54, 76, 78, 114: a, t, c, g, or other
gttctaccctttctgccttctgtttgggacccagcnggtgttctttggtttgcnttcttcaggctctagggctgtncnatccaatacagtaaccacatgcggctgtttaaagtnaagccaattaaaat

SEQ ID NO: 5830 - DNA, 119 bp, Zea mays
  misc_feature: Incyte ID No: 700382434H1
  unsure 12-14, 40, 50, 62: a, t, c, g, or other
agggattgtttnnnactatcatctcacttctaagtaagtnaactggaaanaagattacatgngaacaccatagttagttttcacagcaacttcctaagggtggtgtcagtagccatctt

SEQ ID NO: 5831 - DNA, 299 bp, Zea mays
  misc_feature: Incyte ID No: 700382436H1
  unsure 292: a, t, c, g, or other
aacagagcgaggcgacgccgcggcacctcttctccggcgaagggaaatggcaaccgttccaggggatctgatctggcaggttgtgaggaagaacaactccttccttgtgaagcagttcggcaacggcaagccaaggtgcagttcaccaaggagccgaacaacctctacaacatccactccttcaaacactcgggtttggcgaacaagaagactgtgacgatccagcccagctgcaaaggactcggctgtggtcctctctactaccaagaccagaagcagaacgcacctggantcagcca

SEQ ID NO: 5832 - DNA, 262 bp, Zea mays
  misc_feature: Incyte ID No: 700382439H1
  unsure 20, 129, 169, 190, 249: a, t, c, g, or other
gccgcaatcaaataaataantaaaaacacgccgccgccatcaatggcgatgtcgcgcttcgggcgctccgggcagccggagaaccgcgaatctttctccctcctcgtcctcaacgtctccttccgcacnacggctgacgatctcttcccgctcttcgatcgatacggcnaggtcttagacatctacatcncgcgcgaccacaggactggggatccgcgagggttcgcgttcgtgaggtacaattacgangatgaggcgcggg

SEQ ID NO: 5833 - DNA, 114 bp, Zea mays
  misc_feature: Incyte ID No: 700382443H1
  unsure 32, 50, 60, 92, 94: a, t, c, g, or other
taagcattccaataacaccttccaaaaacctngagtgtaagagctttgtntctttatggnactcccctgtgattgcagtaaattactgtatngnaaattctcagtgtggcactt

SEQ ID NO: 5834 - DNA, 126 bp, Zea mays
  misc_feature: Incyte ID No: 700382444H1
gggaaattaagaggcgatggtcagctgcaaatgcattcatgcgtaaacacatcgagacgccgtctcgaaccattgtaggagttaagtatatgatgatatataatcctgtctatctaataagtccaa

SEQ ID NO: 5835 - DNA, 294 bp, Zea mays
  misc_feature: Incyte ID No: 700382445H1
  unsure 147, 160, 170, 173, 186-187, 220, 222, 231, 271: a, t, c, g, or other
gacaatgtcatcaagggcaccaagaaagagcaggtggagcagatcaagaaggacatcaaggagttcaaggaaaaaaacaaggtggacaaggtagtcgtgctgtggacggcgaacaccgagaggtacgcaacgtggttgcagggcttnacgacaccatggncaagctcctngcntcgttgggacaannacgaagcagagatctcgccatccaccttgtatncnatacctgtntcctcgagggtgtcccgttcgtcaatggaagccctcagancacttcgtgccgggctgatggaa

SEQ ID NO: 5836 - DNA, 294 bp, Zea mays
  misc_feature: Incyte ID No: 700382446H1
  unsure 114: a, t, c, g, or other
cggcctcatctccgacgccacctaccgcgtgttcacctccgcctgcaactactcccgctacgtcaccgagtactacggcggctcgctgtcgccgctgtgcgcccgggtgatganccaggtgacgcggagaccagccgcttcgtcgacaagtacgacgtcacgctcgacgtctgcctctcgtcggtgctctcccagtccaagatcctctcgccgcacgagcaggtcgggcagcggatcgacgtgtgcgtagaagacgagacgtgaggtacctcaaccgccggacgtgcaggcggt

SEQ ID NO: 5837 - DNA, 296 bp, Zea mays
  misc_feature: Incyte ID No: 700382447H1
  unsure 216, 272: a, t, c, g, or other
gccaggacgctcgcgatgcgctctgccgccgacgtctcgtcctgcaccgtcagctgcagggagctcaacggcgacgtgcgcctcatcgtcgtgcagagcctcaccgagttcaccaagatgctccagatcgccgtcagcttcatcagcaagatgaagccgcttccaccgtcagctccagcgcgaactgccacgccatgatcacctacatatgcgcangtggttcttctaataagagagcggggatcgagaagaaattgaagccgctaataatnagccatcgttcttagggttctttc

SEQ ID NO: 5838 - DNA, 298 bp, Zea mays
  misc_feature: Incyte ID No: 700382448H1
  unsure 6, 17, 111, 115, 117, 150, 288, 291: a, t, c, g, or other
agaagnaagagaaaganaagaagaaaaagaagatcaaggaggtttctcatgagtggtcattggtcaacaagcagaagcccatatggatgaggaagccagaagaaatcacancagncncatatgctgcttctataagagcttgacaaatgnctgggaggagcatctggctgtgaagcacttctctgtggagggtcaactggagttcaaggctgttctctttgttcctaagagggccccctttgatctctttgacaccaagaagaagcaaaacaacatcaagctctatgngcncagggtg

SEQ ID NO: 5839 - DNA, 143 bp, Zea mays
  misc_feature: Incyte ID No: 700382450H1
  unsure 11, 136, 142: a, t, c, g, or other
gccgcaatcanataaataaataaaaacacgccgccgccatcaatggcgatgtcgcgcttcgggcgctccgggcagccggagaaccgcgaatctttctccctcctcgtcctcaacgtctccttccgcactacggctnagcgant

SEQ ID NO: 5840 - DNA, 174 bp, Zea mays
  misc_feature: Incyte ID No: 700382451H1
ggttcatgttgaaagttgacatagtgactctagtgtggaggatgcggctagttaagatttggtagctaggttgttcgtccatttgcctatttattatctcagatcagacttggtgccgttccagttggcattgtagcctctttttaccatgaaagttagttcagaagattcttt

SEQ ID NO: 5841 - DNA, 300 bp, Zea mays
  misc_feature: Incyte ID No: 700382453H1
  unsure 184, 192, 211, 267, 283, 291, 300: a, t, c, g, or other
cccctctccactccatcgtcaaggaaggaacacggccctaactaaaccctagctaagggaagggaaacaagaccatggatgcctccaagctccgcgagcttcgcgacttcgtcgaggcgtgcaagaaaatccttcgctcctcgccgaccccaacctctccttcttccgggattacctccagagnttgggtgncaaaattcccgccgccgcnccctctttcgaaagtcccaagagatcttccatggacgacattgatgacgacggtgntgacgacgacggattngatatgangggttcccn

SEQ ID NO: 5842 - DNA, 295 bp, Zea mays
  misc_feature: Incyte ID No: 700382454H1
  unsure 73, 241, 277: a, t, c, g, or other
tgcccctctgccacctcgccgtcggcatgacaacagggtcgaccccgggttcggccccctctcagagaaaacnaaattctaccaaggattccgttgccttgtacgcggtgcaatgctataagtgcacaaatggagtacggttccaaaagaagaatttgagacgcttcgtgagaacttcactaaggatccatggttctgcagcagacgaccagacagctcttgtgaagacgatgctgacatngagtaccacagcagccgcatctgggtttggacaagncccacatacaaagcctcc

SEQ ID NO: 5843 - DNA, 128 bp, Zea mays
  misc_feature: Incyte ID No: 700382455H1
  unsure 11, 53, 84: a, t, c, g, or other
gaggtaatggnggccgcgcctaccaccatcaccgtccaggtcaagttcgccgngcggacgatccccgtggaggtcccggcagcngcttccggcgcggagtgaagcgcctcctccagccgctgaaccat

SEQ ID NO: 5844 - DNA, 294 bp, Zea mays
  misc_feature: Incyte ID No: 700382460H1
  unsure 126: a, t, c, g, or other
gcctagaagaggaaggaagaacagagataagcgacaacgcgtccctcctcgccttcctcccgcctcgagctcttcccggagcaaccggagccacagacgtcaggacagcctagcgcgttccacgcnggtatgcagaaccagatcatgtgccatgcttgccggacccttctgctctacccgcgtggcgcgtccagcgtctgctgcgcggtttgccaggccatcaccaccgtgccgccaccaggattggagatggtcagttatatgtggtggctgtcgaactttgctgatgtatac

SEQ ID NO: 5845 - DNA, 294 bp, Zea mays
  misc_feature: Incyte ID No: 700382461H1
  unsure 25, 31, 75, 138, 170, 172, 210, 240, 248, 292: a, t, c, g, or other
gcttaggcaccatgctccggacgangcagtnatatcaccaatagagcaacaagagcatagaaaagtcttgatgcnctattggtgatattactgcttaggcaccatgctccggacgaagcagctagagccaggtaccanaagaaggtttctaacataattgatgatgttcnanaatggtccccgaagttagctatttctggaatgattganaaacacactggggctaacattacagaaganagcaattncactagcagggctgcgagtagtcatgtgcctcttccaccaaagnca

SEQ ID NO: 5846 - DNA, 292 bp, Zea mays
  misc_feature: Incyte ID No: 700382462H1
  unsure 62, 191, 197, 254, 280, 284, 288: a, t, c, g, or other
gcataagctcacaacagagctgcattcgagctactggatcaacctatttgcagacgaaagcnggtcatttcccgaggtgaaagcagactatatcgcatccacgtcatggcaaagggcactccagtacctgacgatgctgttaccttcgacgacaaggatcctcttgtagctagagtggtcagccagaaggnaaccanccagacacggactgtgtggagccctggttctgaattctctctttgcaattgctcgtngtcgatgcagggtaactatgcaagcncgtnctanaggt

SEQ ID NO: 5847 - DNA, 290 bp, Zea mays
  misc_feature: Incyte ID No: 700382467H1
  unsure 148, 268, 287: a, t, c, g, or other
aatcaagggagggtgaagcaccgccgccgtctccgctgccgcacaaagacgagaggaagaggttcccggcgcctccaccaccatgtcgtcgatgatgaacgcgctggcgaactggctggcgaaccgcgccgcaacccgctggcgcgcntccacatgcacgccgtctcctcgcgcctcaggaaatacggactgaggtacgacgacctctacgacccctacttcgatctggacataaggaggcgctcgtagctgcttagggagtgtcgangccggatcagcgcctcaangtg

SEQ ID NO: 5848 - DNA, 294 bp, Zea mays
  misc_feature: Incyte ID No: 700382468H1
  unsure 86, 229, 270: a, t, c, g, or other
gcctcgtatgataagatagcagcaggagcttagttgtattttgcctcattcataggttgggtctttcctttgcccgattgacatcngaaagaaaaaaagttattcgatgtcagttatgagccatgagcacgtcgtttgttgctgcaagcctgcagctgaaagaggttcattgtttccgatgctaacatgtaacacctgccatttagtacggagcagtacccagcttgtnagttgattattgttttacacttttgaggaagatatcattcnttggtcactttcattcacaaaaaa

SEQ ID NO: 5849 - DNA, 198 bp, Zea mays
  misc_feature: Incyte ID No: 700382470H1
  unsure 61, 63: a, t, c, g, or other
gccaaggcgaaccgcgtcgcgaacccaggatcccatcgagggcaggcgggcagatcccggngncccgacggcgatgggcgaggaggacgcgagcgccgagggagatccgcagcggctgaagcggatcgccgctgcggcgtacgactacgagaacgatgcgcggtgggccgggtattggtccaactcctcgtgccgccc

SEQ ID NO: 5850 - DNA, 201 bp, Zea mays
  misc_feature: Incyte ID No: 700382472H1
  unsure 27, 95, 110, 140, 147, 163, 176: a, t, c, g, or other
caatgatcctggaaattgcagtaacanaagcacacaacgattatagtaactataagatacaataaaacaaataaatgtgaaagtagattcatganaatgtattcctttanaatattgttttcctacagggcctatttaanaagatgnttcattttactgtatnttttgtagttaanataaatgttgctctaatcagattgc

SEQ ID NO: 5851 - DNA, 297 bp, Zea mays
  misc_feature: Incyte ID No: 700382473H1
  unsure 201, 211, 219, 227, 270, 289: a, t, c, g, or other
caacagagctaagagcggcaaattcaaggctgcagcaggagaatgcacatcttattaggcgactggaggttacacgcctaccccctgtacccaagcccagaactagtatggaggtaaaagcattgaggaggctgatcggttgaagcaagaaactgataggttggctaaagaggttgaacaacttcagagtggcaggtttgnagatgtcgangaattggnatatctgnaatggataaatgcctgcctacggtatgagctgagaaacaaggntgccccatcagggaagacntgttgccc

SEQ ID NO: 5852 - DNA, 289 bp, Zea mays
  misc_feature: Incyte ID No: 700382474H1
tgttaattagaacatggagcttaacttgagaaacacgtgccaccacaagggtggaatggaacgcccttgtctaactaattaggaaagtgtttggggccttcgtcttccgaagtcctcaaaaaatgattaacaatgttttccaagtgaaatatatgtacaggaaccttcggacttggaacgaagctgtccataatatggaaagcatgattgggacgaggtcgaatcaattctgaagctatgcgcaaggaagcttcggctcagtagcagaaaaggaaccgactaaaaggaa

SEQ ID NO: 5853 - DNA, 290 bp, Zea mays
  misc_feature: Incyte ID No: 700382477H1
cggatctcgctcggccatcgggactgtacaaggacgagagggagaagagaacagcggattcatcaccgccaggcgtcaggtcagagtgtgttaagacaagatggtggcgaatggcgacgcactgctagagggagtgcggcggcagtgcaagcctgcgcaggcgtaggaccacaagcggtgctgctgctggcggaggtggtgccagctcgatgctccagttttacaccgatgaggctgcgggccgcaaaatgtcaccaaacaccgttctgatcatgagcattgggttcatc

SEQ ID NO: 5854 - DNA, 135 bp, Zea mays
  misc_feature: Incyte ID No: 700382478H1
  unsure 9, 39, 65, 69, 119, 122, 124: a, t, c, g, or other
caacaagancccgtgtctgtgtggcacagagagctgccngggctccctaaactgaggtggggcangatnggtgcccacacccctatttattccccctggtgccctgagctcccagcaanccncnagccttagtgg

SEQ ID NO: 5855 - DNA, 295 bp, Zea mays
  misc_feature: Incyte ID No: 700382485H1
  unsure 147-151, 226: a, t, c, g, or other
gtcatttcttcagaccaagtctgggttggagttgtgcctgtcggcccttcgggacatgctcttaattcttcttatcgtacgcgtaatactatacaatataaacaagagttgggcactgcaatagtaaatttcgcacgcattgtgccnnnnngactccttgttttcttcccttcatattctatgatggacatgtgtgttgacttctggaaaaataggaacccattcnaattcagcgtctgagaacacaatttgggcagcggatctgtaagcacaagcagccagttatagagctagg

SEQ ID NO: 5856 - DNA, 192 bp, Zea mays
  misc_feature: Incyte ID No: 700382487H1
  unsure 28, 65, 123, 156, 186: a, t, c, g, or other
gaggaatgggccggctgctttggcatcnaggagcaggacatcaacaaggatctggtgatctaagntcacgcctcctgctgcagtcctgaactctctccctctgatgtgtcacccctcccattncccccttgtttaaaatgtttggatggttggctnttccgcctggggataaggtgctaacatagntttaac

SEQ ID NO: 5857 - DNA, 288 bp, Zea mays
  misc_feature: Incyte ID No: 700382492H1
  unsure 135, 178, 188, 249: a, t, c, g, or other
atttgccttctgttgggtgtatgtgatcaagattagagcagctgagcacttgtcaatttggaaggccttgttgaagacaccagcatcaattgttctgattatctactgttttctttgtgatggtttgtgggtggnttatctgtcttccatttgtacctgatgggcactaaccagacancatacgagantttcaggtatcgctatgaccggcgcgataatccatataacagaggtactctgaacaatttnctagagatattctgcaccgctatccccctttcgaagaat

SEQ ID NO: 5858 - DNA, 213 bp, Zea mays
  misc_feature: Incyte ID No: 700382494H1
  unsure 3, 26, 36, 52, 75, 121, 129, 152-153, 170, 196, 200: a, t, c, g, or other
acncactccaccttactaccagacanccttagccanaccatttacccaaatnaagtataggcgatagaaattganacctggcgcaatagatatagtaccgcaaggaaagatgaaaaatttnaccaagcntaatatagcaaggagtaaccccnntaccttctgcataatgnattgactagaaataactttgcaaggngagncagagctaagacc

SEQ ID NO: 5859 - DNA, 153 bp, Zea mays
  misc_feature: Incyte ID No: 700382507H1
  unsure 120: a, t, c, g, or other
gcggggcagcagcacacagccccatcccaatcctagtcgatcttcttcccctcctcaaggaagaaaagaagctgaaccatggggaagagaaagtcagctgctaagccacctcctaagaancggatggacaagcttgacactgtcttttcctgc

SEQ ID NO: 5860 - DNA, 295 bp, Zea mays
  misc_feature: Incyte ID No: 700382511H1
  unsure 37-38, 80, 87, 106, 138, 175, 193, 205, 248, 254: a, t, c, g, or other
cgttcgagaaggaggacgagacgagggcgcagtaganngaagctgacggaggcgggcgccgacggggtcatgatgcgacntctggtnggggctggtggaagggaangagccgggagtctacgactggagcgcctacangcaggtgttcaagctggtgcaggaggccgggctgaanctgcaggccatcatgtcntgccaccagtgnggcggcaacgtcggcgacttcgtcaacatcccgatcccgcatnggtgcnggacgtcgggcaaaagcaaacccgaaatcttctacaacaac

SEQ ID NO: 5861 - DNA, 293 bp, Zea mays
  misc_feature: Incyte ID No: 700382512H1
  unsure 12, 42-43, 45, 127, 188, 235, 243, 288-289, 291: a, t, c, g, or other
tgcagaatgggncagaagatcacattccctggcgaagtggannangcgcctgatactggccactggagatatcatctttgtactccagcagaaggagcatcccaagttcaagagaaagggcgatganctcttctacgagcacacactgatcttgactgaatctctgtgtggctccagtttgttctgantcacttggataacaggcagctgctgatcaaatcgaaccccggcgaanttgtgaancctgattcttcaaggcaatcaacgatgaaggcatgcccatgttcnnangg

SEQ ID NO: 5862 - DNA, 296 bp, Zea mays
  misc_feature: Incyte ID No: 700382513H1
  unsure 124, 130, 134, 142, 151, 185, 188, 206, 210, 212, 225, 267: a, t, c, g, or other
tccattcccaactgcacctgcgcgcctcgactggtagcccgaaccctagctagcaggtcggaggcgagagagcagccatggcgcggtgcctcgcgctcgtctccctccttctcctcggcctcgnctccgncgcntccgctgncgatgcgcnctttgtcgtcgcgcacaagaaggtttcgctctcncgncccaagccgggcgtcgancgcntngccgtctccctcnacctcttacaaccagggatccgcgactgcctatgatgtgtcnattaatgacgactctttggccaaacaaaa

SEQ ID NO: 5863 - DNA, 295 bp, Zea mays
  misc_feature: Incyte ID No: 700382516H1
  unsure 15, 39-40, 47, 49, 152, 161-162, 230, 258, 263, 268, 271, 273, 287: a, t, c, g, or other
gctgaaggccctcancaacttgccgcacacagacttcannctgtgcncngtgcatgatcgaccaggcacatcaagaagaacggccaatccgacagattttgtacctcggggacctgctggagacctgccatttccaggccttctggcaagcnctggatgannacatggacctcttggaaggtataactggctttgaagactctgtccgaaagtttatctgccatgttgtnggtatcactttaccagcacattgaccgntggcngctgnccnanatgctcggggatcngtcggaca

SEQ ID NO: 5864 - DNA, 298 bp, Zea mays
  misc_feature: Incyte ID No: 700382521H1
  unsure 71, 81, 139, 144, 156-157, 182, 195, 201, 224, 228, 231, 241, 244-245,: a, t, c, g, or other
cccgactacaggtctgatcgccatgaaagcttctgttcatttgagctcgggggagtccgctagtcttattnttcttaattnctcttggctttctggaaccatacgaatcaataaggaatgagccgtgttcactttccanttccnccatgtgcaagnngcgcaacggccaggttctagatgtnaaattcgtcctcnaatacngaaggtaggatggatgttaatgnaganacngcgctcccanttnnanggcatgtgcntccgntttgngggaataaaagatgggccaaaancngagggc

SEQ ID NO: 5865 - DNA, 129 bp, Zea mays
  misc_feature: Incyte ID No: 700382523H1
  unsure 23, 33, 87, 89, 110, 112-113, 121, 125, 127: a, t, c, g, or other
gagcatttttgcatctgacattntacctagaanaaaagacaccagacttggcagagaggtggcaaatcagtcatgattacaaacctnanagaggtggcgaatatgtaacncnngcgcttanatgngncc

SEQ ID NO: 5866 - DNA, 295 bp, Zea mays
  misc_feature: Incyte ID No: 700382525H1
  unsure 2, 14, 87, 105, 193, 201, 204, 211, 234, 252, 272, 274, 291: a, t, c, g, or other
gncggtacacgctncacgagggcacggtgctgatcccggggatggggcgctacgagatcggcagccactacatcccggacatcggcnggctggaccacagcgtcnccgccgccacccacgggcagtacatccccggcgccgacgacacctgggtgcccaaccccggcttcgaggtccccaacccctttacgcnccggcgcngcnactccangaacacgtacgatcgagtacgancccgcaacgccggagaantcgatcgatcgatcatatcncntgcgcgcgctgaataanggta

SEQ ID NO: 5867 - DNA, 294 bp, Zea mays
  misc_feature: Incyte ID No: 700382528H1
  unsure 28, 41-42, 45, 48, 91, 108, 113-114, 117, 163, 177, 181, 216, 225, 247,: a, t, c, g, or other
accgcgcggctccaggctcctgctcagnaaggggagaaganncgnacnttccttgggaaattcgcaggaggagagaaggggaacaaagatngggcgcggcaagatcgngatcnngcngatcgagaactccaccaaccgccaggtgaccttctccaagcgccgnaacgggatcctcangaangcgcgggagatcagcgtgctctgcgaacgccgaantaggcgtcntcgtctttctccagcgccggcnaannttacgaatactgnncccgaagaactcnctatcaaaaatcctgg

SEQ ID NO: 5868 - DNA, 293 bp, Zea mays
  misc_feature: Incyte ID No: 700382532H1
  unsure 43-44, 50, 57, 112, 223, 245: a, t, c, g, or other
ggaatttacctctaaatgccactgaaactcaactggaggatgnnttcaanaagtttngtaccatcaagcaaaatggcattcaagtcagaagcaataagatccaagggttctnttacggatttgttgagtttgaggattctacatctgtccagagtgctatagaggcttcccctgtgatgattggtggtcgtcaatgttacattgaggaaaagagggacacctngttcacgaggctccagcagagntggcaggtttgtaccaggcaggggcaacaacttcagaaatgaaggtac

SEQ ID NO: 5869 - DNA, 133 bp, Zea mays
  misc_feature: Incyte ID No: 700382537H1
  unsure 6, 15, 24, 37, 44, 47, 50, 68, 82, 86, 103, 106: a, t, c, g, or other
tgatcntcttgcacngcttatttngttacctgtcctngcttatnatnatnaagtggtgtacggggtanaaagcagatctatnccangttatgatctacatgtnccntagcccaacagatgagcttggtgaaaa

SEQ ID NO: 5870 - DNA, 170 bp, Zea mays
  misc_feature: Incyte ID No: 700382538H1
  unsure 16, 91, 113, 125, 151, 155, 158, 167: a, t, c, g, or other
agcccttccaatctcntggtgacggacacgtccggagggtgtggcgcgactacgagatcgaggtggtgtcggagaagttcgaggggaagcngctgctggagaggcaccggatngtgaacaccgcnctggcgtctcacatggcggagatccncggnggnccatcaagnaag

SEQ ID NO: 5871 - DNA, 120 bp, Zea mays
  misc_feature: Incyte ID No: 700382539H1
  unsure 17, 82, 90: a, t, c, g, or other
gtgttgtcgtgcataantgccgttgggacgaatctaagccaattcatatgcatcggaagattcacagccgtctcgttccaantcctaggncacatgaagacagttctggtgttgaccttg

SEQ ID NO: 5872 - DNA, 120 bp, Zea mays
  misc_feature: Incyte ID No: 700382540H1
  unsure 4, 25, 66, 86, 104-106, 109-110, 119: a, t, c, g, or other
ctanaatagaatatagcatctttcntatggtaggaacccacacggaaactttcctttaactccctntttacactttatggtaagtngcagggggggaaatgcannnatnnatcatttcna

SEQ ID NO: 5873 - DNA, 288 bp, Zea mays
  misc_feature: Incyte ID No: 700382541H1
  unsure 37, 39, 44, 85, 105, 175, 246, 266, 270: a, t, c, g, or other
gtctacaagagccctgcttcagatacttacatagttntnggggnagccacgatcgaagatttatcccagcaagcacaactagcanctgctgagaaattcaaagtncaaggtgaagctgtctcaaacattcaagaaaacacacagactcccaactgtacaagaggagagtgaagangaagaggtcgatgaaacaggtgtagaagttaaggccatagaattggtcctgtcacaagcaaatgtgtccgngagccaagggcattccggancccngaaggaacaaccattatg

SEQ ID NO: 5874 - DNA, 291 bp, Zea mays
  misc_feature: Incyte ID No: 700382542H1
  unsure 24, 38, 79, 168, 171, 205, 211, 218, 222, 262, 265, 267: a, t, c, g, or other
gcatgggtgaaaagcgatctgaantggcttctgatcantcgatatttgttggcgatctagctgctgatgtcactgatgnaatgctgctggaacttttctccagcaagtaccgctcggtgaaaggagctaaagttattattgatgcaaacacaggccgttccaggggcnatngatttgtcaggtttggagacgacaacgaccaatnctcctnccatgtntganatgaatggtgtatagtgctctacgaggccaattcgtatanggncngcgaatccccagaagatctttcag

SEQ ID NO: 5875 - DNA, 292 bp, Zea mays
  misc_feature: Incyte ID No: 700382543H1
  unsure 114, 184, 205, 209, 279, 286-287: a, t, c, g, or other
ccggacggaaccaaacgccaaacgctgctgcgctctctccttctcgtcctgaccccccagagcgagagggaggggcacccagaggagcctgtcgttttgatcggtgtctctgcncccgttcccgcgaggagagaacaacctggagaaaatggcgccgatctccggagccacggcagtccttgtnatggccgtcgtcgccacgctncgcngccgcggctaacgccctggcccccgccccagcacctgctaccagtgaacggaacaagtgtagaccagggnatcgccnnagtcc

SEQ ID NO: 5876 - DNA, 286 bp, Zea mays
  misc_feature: Incyte ID No: 700382544H1
  unsure 37, 40, 164, 228, 255, 272: a, t, c, g, or other
cacatttatctctgacaagaagggcatttggaggtancanccccaagactgtttctgagaaggagtggtggcaagccacagacaccaagttccaggcctggcctcgcactgctgggccaccggttgtcatgaaccccatcagccgccagaacttcatcgtcaantccactgagtaggtttgggctggagaagctggttctgcgacttggtgccgccatgaagccaganttcctttctaaggtcttaatcaattgnaataaaacgaatacagnccggattttttgtg

SEQ ID NO: 5877 - DNA, 285 bp, Zea mays
  misc_feature: Incyte ID No: 700382548H1
  unsure 11, 20, 34, 40, 51, 92, 114, 133, 162, 169, 190, 222, 236: a, t, c, g, or other
caacgacgtcngtgcagatncagagctcacagtnacagtnacagaggctgncgacggtgttacagtgcggagccgtctgggcagctgttgangcgccggcggcctaagacggtnaccggcgaagaggacatcnacctgctagggatcctgccgccgctcgcngtgttcnccttcttctacttcctcgtcnctcctccggtgatcatgaactggatgaggctnaagtggtacaaacncgattcgtggagacgtaactgcattcatgttcacctacctttctaccca

SEQ ID NO: 5878 - DNA, 146 bp, Zea mays
  misc_feature: Incyte ID No: 700382549H1
cgacgcgcacgcgcagagctccgcatccgcaccggccgccggcggcatggatggggaagctctccgccctgaagcgggaagcggtcggagtggactaggcgctcggtgacttcctagtttagaagcggtaggtggaggcgatgcgg

SEQ ID NO: 5879 - DNA, 166 bp, Zea mays
  misc_feature: Incyte ID No: 700382550H1
  unsure 32, 118, 121, 144, 152, 161: a, t, c, g, or other
ctcagccaggcactgtaaaacctgaagaaggngaccgccacccttattcggtgttagattgtgcgtcacagcgtgaagcaattttgccttcgtactctatatccagaaaacattggcnagnggcctttttaataaagaatctgnaaatgttntgcgtaaantctgc

SEQ ID NO: 5880 - DNA, 138 bp, Zea mays
  misc_feature: Incyte ID No: 700382554H1
  unsure 87, 111, 133: a, t, c, g, or other
cacagtcttaagatcatggtgtttttatgtctcaaacatggtcgcaattgtgacattaggtagatgggagatttttgactgagtttngtgttttgtgagcgaagtcagggnaggaaatgatgtccgagagtgnagagc

SEQ ID NO: 5881 - DNA, 188 bp, Zea mays
  misc_feature: Incyte ID No: 700382555H1
  unsure 27, 38, 104, 155, 164, 171, 179: a, t, c, g, or other
tggaattagattgagcaataatttctncaacacagggncagggacgcaaacatcatgtactatctacagcttcatcatgggtttgcgtccctgtccctgtgttnatggaattagattgagcaataatttcttcgccaagtttattcagcggctgnccatatccnggtatcntccatgcnttgggtaat

SEQ ID NO: 5882 - DNA, 288 bp, Zea mays
  misc_feature: Incyte ID No: 700382562H1
  unsure 31, 37, 155, 169, 254, 273: a, t, c, g, or other
gtccaagaaaccgtcaatgtgggcacagaanctgcanctgctctgaaagcacagacagaacaaatgagcagagttgttaatgagttggattccatccatttctccatcaaaaaggcatctcaattggtgaaagaaatcggtcgacaggttgcaangatcgatgcatcanggccatgctttttctcattgttgctggagtcatagctataataattgttaagattgtggaacccacacaacaaggacattcgcgnacatccctgggcttggcancacccgtcagcaggg

SEQ ID NO: 5883 - DNA, 101 bp, Zea mays
  misc_feature: Incyte ID No: 700382566H1
  unsure 14, 18, 69, 90, 93: a, t, c, g, or other
gtttgtcttatganacanacatctgtccatgcatccatgtgtgcatgtactacaaataaacagcctatnatttaggttacttaggtgcanaancatttggt

SEQ ID NO: 5884 - DNA, 111 bp, Zea mays
  misc_feature: Incyte ID No: 700382569H1
  unsure 10, 13, 22, 37, 40, 44, 91, 96, 107: a, t, c, g, or other
ctgcgagaantgnagactattntcagccatcagcacngtncgcnattccagcaaatgtcgacattaactctgaagggccgcaacagttatngtgcngggccacagcngaac

SEQ ID NO: 5885 - DNA, 294 bp, Zea mays
  misc_feature: Incyte ID No: 700382574H1
  unsure 94, 248, 254, 268, 283: a, t, c, g, or other
ccaccatcgccgtcggcgacgactgcgtctccatcggccccgggagcaagaccatccgcgtgaagggcgtcaagtgcggcccgggccacggcancagcgtcggcagcctggggcggtacaaggacgagaaggacgtggaggacgtgaaggtgacggggtgcacgcttcgccggcaccaccaacggcctgcgcatcaagtcgtacgaggacttccaagtcgttcgctccaggccaaccaagtttctgtnacccangacgtcaccatggnacaacgttttcctancccattcatca

SEQ ID NO: 5886 - DNA, 277 bp, Zea mays
  misc_feature: Incyte ID No: 700382575H1
ggataatctcattgtctggcgtgctccacttttccactcactcccggtggagttcacaaagtcccagattgttgcttcaatacctggatttttcttctgcttgtggtatgcgtcaaagaagcattggcttgcaaataatgttctgggattggctttctgtattcaggggattgagatgctgtcatgggatcatttaaaaccggagccatctctgggtggacttttgtgtatgacatttctgggtgttcttcatccagttatggtcagtgtggctaaa

SEQ ID NO: 5887 - DNA, 179 bp, Zea mays
  misc_feature: Incyte ID No: 700382576H1
  unsure 2, 22, 25, 65, 95, 129, 135, 141, 145, 153, 176: a, t, c, g, or other
gngcctggtagtccttacattntcnacagctgtggtgaggaaggctttgttcaacattttgatcncagaacaaacacagcctcaaaactatttcnttgcagaaactccactaaatcagtatactcatcncttgtncacctnaatncgcttgcnatagatccgaggaacccaaatcnttt

SEQ ID NO: 5888 - DNA, 281 bp, Zea mays
  misc_feature: Incyte ID No: 700382579H1
  unsure 234: a, t, c, g, or other
catgcccatcaaatcgttaaacttgttagatcggtaggcagagagaggccagactgatgggaatggcagcgaaggagcactttgtgcttgttcatggtgaagggcatggagcctggtgctggttcaagctccgctggctccttgagggtgctggctaccatgttacatgcattgacctagccggaggggcgtcgatcctactgaccccaacacaatccggtcgttccagcagtncgacaagccactcatagacctcatttcaacttgccggaggggaggaa

SEQ ID NO: 5889 - DNA, 164 bp, Zea mays
  misc_feature: Incyte ID No: 700382582H1
  unsure 39, 74, 93, 110, 121, 159: a, t, c, g, or other
gggaggctctgcagccctgctgaagggccctaactaganttctagagtttctgattctgtttctcagtagtccntttagaggcttgctatacntggtctgcttcaaggangtcgaccttcnaatgtatgaagaatgggatgcattgatctcaagaccanagaca

SEQ ID NO: 5890 - DNA, 148 bp, Zea mays
  misc_feature: Incyte ID No: 700382585H1
  unsure 45, 106: a, t, c, g, or other
aaaagagcagattttagcagagcagcgagggtcggagaagcctcnccaagcttcgaatcgctatgcagcccgtcaaggtgtacgccgaccggcggtacgcaacccncccgagctgtcatcatcttctgcagggtgaaccagatcgtgg

SEQ ID NO: 5891 - DNA, 281 bp, Zea mays
  misc_feature: Incyte ID No: 700382592H1
ggcaaactcggctgccataatctcggagctggaaaagaagaagcagcagaagaaggaagaacagcaaaggctggacgaggaaggtgctgccatagcagaagcagtcgctcttcatgtcctcataggcgaggactccgatgaaccctgccatttgatgctgaacaagcaccatataaggtgcaaccattgggccccctcggctgcttttgaattcaccgtggacgcacagcccgccgaggtgtacccgtctgaggatggatggtatgcggcagccatgcgta

SEQ ID NO: 5892 - DNA, 281 bp, Zea mays
  misc_feature: Incyte ID No: 700382596H1
  unsure 37, 81, 107, 112, 182, 191, 267: a, t, c, g, or other
agaggaggtagcaacaccgactgcttaatctcttccntttcctcttcctatctccagcgcatcccaagaggcggaaagggnggatcgtggagcggcgaattattatntgttncccccaagatgtcttctccaagcaagcgccgggagatggacctcatgaagctgatgatgagcgactacanggtggaganggtgaacgatgggatgcaggagttcttgttgaatttcgtgggcctaacgaaagcattatcaaggaggtgtatgganagttagagtagaat

SEQ ID NO: 5893 - DNA, 313 bp, Zea mays
  misc_feature: Incyte ID No: 700382601H1
  unsure 11, 14, 18, 36, 58, 72, 122, 130, 132, 207, 285, 308, 311: a, t, c, g, or other
cagatcctccngcntccntctgcgaggttcccagancgagccatcgccggcgctaggntcggggatcttgtngggtcccgtcccgtcctaccacttcgccggcgctgcgtcgccgtcactgngtcagttnangactcaggatccccaagatggcttcttcaaacggtgaggctgagcaacaatggatagagaatatcaagtcaggangaacagttccctgtctaccacctgaaaactgtcctaatggtgggtactcctcccggtgattcatttatggtcagaggnccagaatatctacaaacaaggtnaanat

SEQ ID NO: 5894 - DNA, 300 bp, Zea mays
  misc_feature: Incyte ID No: 700382604H1
gtgacagatcgtttggtggattaagctttactaccacagatgtgggcaatgtccttgcgatgtcaggtctcttcctttttctatatcaaatgttgatctatccgttccttgccaaaacggtggaccacatcacattagtccgtgcagtggcgttattgactctaccggttcttgctagctacccattctttccttcgttgtccgggttcgggctcatggtggtagtaaattgtgcatcttttctgaagaatacattctcggtaactaccattaccgtgttcaacttttgatgaatgaagc

SEQ ID NO: 5895 - DNA, 300 bp, Zea mays
  misc_feature: Incyte ID No: 700382605H1
  unsure 298: a, t, c, g, or other
gaaacaagcgcacaagatcaaatacctcgccgccaacaatggcctccaggtcctccatcctgctcgccatggtgatgctggctgcgctattcgttgttggtttgtgcaccacccccctcaccttccaggtcggcaagggatccaagcctggccacctgatcctcacccccaatgttgccaccatatccgacgtggagatcaaagagcacggtggcgatgacttctcctttacgctcaaggagggcccgactggcacctggacgctcgacaccaaggccccgctcagtaccccctttgnca

SEQ ID NO: 5896 - DNA, 299 bp, Zea mays
  misc_feature: Incyte ID No: 700382607H1
  unsure 86, 99-122: a, t, c, g, or other
gaacccatagctgacgacaccaccgtgtggttcgacaaaataaaaaggagagagagagagatggctctgtcgtctcgccgtatggncgccgcaccattnnnnnnnnnnnnnnnnnnnnnnnncgtggcggcagagaggacgatgggcagggtggtggtggaagagacgctctgcttgtcgcagagccatgccttcaaaggcgtgtgcctcagcaacaccaactgcgacaacgtatgcaagacggagaagttcacaggcggcgagtgcaagatggacggcgtcagcgaagtgctactgca

SEQ ID NO: 5897 - DNA, 297 bp, Zea mays
  misc_feature: Incyte ID No: 700382610H1
  unsure 32, 97, 176, 262: a, t, c, g, or other
gcggaactgcttcatccggggctcggtggtgnggtacgtgctgctcccgcaggacggcgtggacgtggacatcctgcacgacgccaccaggagggangcgcgcggaggctgatcggcatcggcatcggcccccctcacctgtgctgcttctcccccggggaggagattgatctgcnttgccctgatctcgtctggttgtacgaaacatatgctgatctgagtggccccaactcccccagcacacacttgatccaccacccanccagctccctgcctggtatgcatgttccttgctgt

SEQ ID NO: 5898 - DNA, 225 bp, Zea mays
  misc_feature: Incyte ID No: 700382614H1
  unsure 145-168: a, t, c, g, or other
gccaagtcgtcggcgtccatggaggaagaggcatgcgcggagaagaagtacggagggatcgcacccaagaagcccttgatatccaaggaccacgagcgcgcctacttcgattctgcggactgggtgctgggcaagcaagccgcgnnnnnnnnnnnnnnnnnnnnnnnngcagccgcggtcgagtctctgaagcccaagctgaagagaacgccgcaccaccagctg

SEQ ID NO: 5899 - DNA, 304 bp, Zea mays
  misc_feature: Incyte ID No: 700382615H1
  unsure 66: a, t, c, g, or other
gaagctccgtagctaaattcaaatattacaaacacaaaagtggagtgcagaaccaaaatggctgcntcgaccgtccttctcgttgcttttctagcattggtcacttctcatgccattgcctctgatcctagcccgctccaagacttctgtgttgccgacaaagactctccagtgaaggtgaatggatttgtttgcaaagaccctatggctgtgaacgctgacgacttcttcaaggctgcaaaacttgatcagccaagggacaccaccaaaagcaaggtgggatccaagttactttgatcaatgt

SEQ ID NO: 5900 - DNA, 306 bp, Zea mays
  misc_feature: Incyte ID No: 700382616H1
  unsure 257: a, t, c, g, or other
gccatgggacgggccataaataagacagttatggttgttgaattgatcaagagaagggttggaggtcttcatcagaacactgctactgaatctgttgatatcacagacacatgggaacctttggaagaaggccttctcccactagagacaactcgccatgtgtcgatgatcactgtgacactgtcaaagaaccctctggatacatcatctccaggataccagccacctatcccagctgaagaggtgaaacctgcttntgactatgatcatgaagatcgtatcccactggtgtggagaggacgtggc

SEQ ID NO: 5901 - DNA, 300 bp, Zea mays
  misc_feature: Incyte ID No: 700382620H1
agctgctgctcttggcctgctacgacctcacggccacctctgtcctgtcccactagactagctgcagctagcgcctcttcccctcgccgccgccccctatccgagagcgacgagcatggcgcactccctcgccgcctccttctcgccggccgccgcgcggggccaggtgacaaatgtgatttcaagccggagctcggtttccttccagagccacaggatgacttctgtatccatccgttcaagaccaagttctcttcgtttcaagatttgctgttcggctaagaggagacagtcgacaag

SEQ ID NO: 5902 - DNA, 296 bp, Zea mays
  misc_feature: Incyte ID No: 700382622H1
  unsure 45, 50, 92, 94-95, 100, 105, 250, 258, 273, 292: a, t, c, g, or other
atagaggacccacaaggaaacaaccaagcacatacgctttcccanttgtnaaacatgatgcaagcaaatcctttgagcactagcagcctatngnngtcanatcanaatcatccatctcttcatggcttagagtttgatttgcctatcttgaagcaaaatataacgcaggcacgactacaaatcctagaccagccatatccatgcaggaggccctgaaagcaggggttttctccaacgctcggtctaggcntctcttcnaagtactagcattcngacggggatcctctccctnagca

SEQ ID NO: 5903 - DNA, 298 bp, Zea mays
  misc_feature: Incyte ID No: 700382623H1
ctttgcacaagcacaaagtccatgaaaatagaagtcggaacattgaagctttggaggcccgtcctgattgattcaaatgaaaaggttgaagaaagtggtagtttagatagtaagaagagcctattcaggaattggccattgatgtcatcaataattgtctattgtgtcttctccttccatgacatggcttacacagaggtgttctctctatgggctgaaagcgacaagaagtatggtgggctgagtttatcatctgaggatgttggtcaagtgcttgcagtacaggtgccagtcttct

SEQ ID NO: 5904 - DNA, 294 bp, Zea mays
  misc_feature: Incyte ID No: 700382626H1
  unsure 17, 62, 188: a, t, c, g, or other
ggggacaggtttttgtngctttacattgcttcctagtttacagcatgatgcaaatgattttntaacttagtgttaggagaaattattttccatctttaacctcttagttgtctaagagttaaatattactgaatttcagacgttcaaattgatcatcacaaatcctttaaaacaattacctaaaaganaccagaaatcctgccttctttgtgggggaggggggagagaggggaaggaaatggaacaagttgtgtttgtgttagcatgtgggtgatgtaacttcaaatatgggag

SEQ ID NO: 5905 - DNA, 222 bp, Zea mays
  misc_feature: Incyte ID No: 700382629H1
  unsure 13, 43, 48, 51, 81, 94, 118, 130: a, t, c, g, or other
ggagaataagganaaaacaatggcggtgctactccgccgcgcngcggnttnctcgtcgtcgctgctgtctgcgcggacggngacttccacgttntactcctccgaccccaacctcggntccgcgcgcgtngtcttccagacgaattttggtgatattgagtttggtttctttcctcatgttgcacctaagactgtcgagcacattttcaaacttgtgcggct

SEQ ID NO: 5906 - DNA, 297 bp, Zea mays
  misc_feature: Incyte ID No: 700382630H1
  unsure 156, 159: a, t, c, g, or other
caccttcgaggggcgcttcgtcatctacgtgaaggccggcacgtataaggagtacgtcaccgttcccaagaacatggccaacatcttcatgtacggcgacgggccgacacagacggtggtcaccggcgacaagagcaacgcaggcggcttcgcacnaangcctcagccaccttctctgctgagggcaacgggttcatctgcaagtcgatggggttcgtcaacacggcggggccgaggggcaccaggcggtggcgatgcacgtgcagggcgacaagtcggtgtctacaatgccggttc

SEQ ID NO: 5907 - DNA, 300 bp, Zea mays
  misc_feature: Incyte ID No: 700382631H1
aaggcatcgtcctgcactgcttaaacgactcggccgactacggctttcagttctgtcttcatggttttgttctgcgctctacattcttcgcacaccctcgcatgcttcattcagtctgccgtgtgttaatctgcctgcgtatcttctcgaagatgctgcgcatcgcaaaagcagtaatgaccttccttctcataccatttggtaaggtttgatttgctgacaaatgcagcatctggtaagtttctccccgtagtttggtctccgtgctgcgtgcgctgctcctggtcaggaactgcagta

SEQ ID NO: 5908 - DNA, 309 bp, Zea mays
  misc_feature: Incyte ID No: 700382633H1
  unsure 19, 264, 291: a, t, c, g, or other
cacccgcctccactccccnctcccaggtgctgcccaggtaagtcggcggcggcgatgacaacgcgcttcaagaagaaccgcaagaagcgcggccacgtgtccgccgggcacggccgcattcggcaagcacaggaagcacccgggaggtcgcggtaacgccggtggcatgcaccaccaccgtatcctcttcgacaagtaccatccgggctacttcggcaaggttggcatgcgttacttccataagtccgcaacaagttctactgnccgcggtcaacatcgagcgcctctggngatggtgcccaccgacaa

SEQ ID NO: 5909 - DNA, 297 bp, Zea mays
  misc_feature: Incyte ID No: 700382636H1
  unsure 238: a, t, c, g, or other
cagatacctcatggacgatcaggagaatgagaatgagcacgagaagcatgctgatgctgggactgacatcgagaaagaagaggaggacgaagatggccacaagcgtgtcgtcgttcttgggccccaagtccccctcaaggaacagctcgagcttgacaaggatgatgagagcctgaggaggtggaaggagcaactcctcgggcaagtcgacaccgagcagctcggagagactgcggancggaggtgaaggtgctcaacctgaccatcctgtcaccggggcgccagatctagtgtacc

SEQ ID NO: 5910 - DNA, 298 bp, Zea mays
  misc_feature: Incyte ID No: 700382638H1
  unsure 84, 89: a, t, c, g, or other
cgcaagattctctacgagatccggacgtggtacccctgccgcaacatcgccacccagatcgtcgatctaaagaaccgcgcgcanatatncggcgagcaccgaaccaggtacggcgtccgcgacccgcagcctaggaagaagagcaacttgggggcgctacggggtatctcgctgctgagaatcaggacgtaacccgacactcgtccgcgcccagcagcctgtgggggtgaagtgctctgtgcttgcaggcgcctgcaacctctgcaacggtggcatccgctcgtccgggagccagcac

SEQ ID NO: 5911 - DNA, 158 bp, Zea mays
  misc_feature: Incyte ID No: 700382639H1
  unsure 3, 5-6, 16, 19, 23, 29, 62, 113, 115, 157: a, t, c, g, or other
ggntnnttgcttaagnttngatnccaaancctagagccagctgataatatgtaataatctanaggagagaataatgatgtaccaataagtggagattcctccttatgatgcangntaggttatggaagatgtaaaatattcaactttttcctccttnt

SEQ ID NO: 5912 - DNA, 295 bp, Zea mays
  misc_feature: Incyte ID No: 700382640H1
  unsure 251: a, t, c, g, or other
agctgatcggcgagtatgggctccggaacaaacgtgaggtctggagggtcaaatttaccctggccaagatccgcaaggccgcccgggaactgctgacgcttgatgagaaggacccacggcgtctgttcgaaggcaacgccctgctgcggcggctggtccgcattggggtgctggatgagggcaagatgaagctggattacatcctgggcctgaagatagaggatttcttagagagacgcctgcagacccangtcttcaagctgggcttggccaagtcctccaccacgctcgcgtg

SEQ ID NO: 5913 - DNA, 218 bp, Zea mays
  misc_feature: Incyte ID No: 700382642H1
  unsure 29, 71, 143, 209, 214: a, t, c, g, or other
gtactgacctgaaaacttgtgacaagaanaacaccaacaagtgctccctgggctgaggaccctttcttgcntccccaccccggaagctgaacctgagggagacaacggcagagggagtgagcaggggagaaatagcagagggnatggagggtcacataggtagatggtaaagagaatgaggagaaaaaggagaaaagggaaaagcaganagganaaaa

SEQ ID NO: 5914 - DNA, 293 bp, Zea mays
  misc_feature: Incyte ID No: 700382643H1
  unsure 7, 11, 23, 34, 55, 57, 71, 84, 97, 157, 190, 200, 216, 222, 238, 262,: a, t, c, g, or other
gacagtnagangggtatggattngttgagttctnttctcatgcatcagcagagananctcttcagaatttnactggtcatgtgntgccaaacactgnccggccatttaaattgaactgggcatcgtatagcatgggtgaaaagcgatctgaagtggnttctgatcactcgatatttgttggcgatctagntgctgatgtnactgatgaaatgctgntggagnttttctccagcaagtnccgctcggtgaaaggagctatagntattatngatgcaanacaggccgttcnaggg

SEQ ID NO: 5915 - DNA, 300 bp, Zea mays
  misc_feature: Incyte ID No: 700382647H1
  unsure 31, 37: a, t, c, g, or other
gaagaacagggccaagagcggcggcctcgcnccatgngacaccactgagggcggccccgccacatccactgccgcggacgtcccacaaccaatggacacgtccgagggaaagcagccatcgtcggccacagcggcgctcggttcgatcaacaagaaaataaagaagggggtgcatatgaaaaggtcacagaatgctaggaaaatgaaagcaattgctagggctgtatcgaagaatgagaagtccgaggagaagatccagaaagcaaaaggcaagaagacaagaatcagtcggccaagtct

SEQ ID NO: 5916 - DNA, 300 bp, Zea mays
  misc_feature: Incyte ID No: 700382649H1
  unsure 96, 226: a, t, c, g, or other
tgatcttcttgaacagcttatttggttacctgtccttgcttattattattaagtggtgtacggggtcaaaagcagatctataccatgttatgatcnacatgttccttagcccaacagatgagcttggtgaaaaccagttgtttagtggccagaagacagtgcagcttgttctacttctgcttgctctggtgtctgtgccttggatgttgattccaaaacctcttcnattgaagaagcaacatcagcaaaggcatcaaggtcaccagtacgcaatgcttcagggcgtgatgaatcagtggg

SEQ ID NO: 5917 - DNA, 293 bp, Zea mays
  misc_feature: Incyte ID No: 700382654H1
  unsure 22, 26, 28, 59, 120, 131, 134: a, t, c, g, or other
tccattcccaactgcacctgcncgcntngactggtagcccgaaccctagctagcaggtnggaggcgagagagcagccatggcgcggtgcctcgcgctcgtctccctccttctcctcggcntcgcctccgcngcntccgctgccgatgcgccctttgtcgtcgcgcacaagaaggtttcgctctcccgccccaagccgggcgtcgagcgcgtcgccgtctccctcgacctctacaaccagggatccgcgactgcctatgatgtgtcacttaatgacgatcttggccaacacaag

SEQ ID NO: 5918 - DNA, 290 bp, Zea mays
  misc_feature: Incyte ID No: 700382655H1
  unsure 52, 68, 75, 103, 278: a, t, c, g, or other
ggcacaacgtgttctgggacgaccagaactcgcagatgcagtgggtgaagcncctcaaccttgcgcantcaaggnagccatgcagaagcggctcaagtccgtngtgtcacgctacgccggcaaggtcatccactgggacgtggtgaacgagaacctgcacttcaacttcttcgagacgaagctgggcaccatggcgtcggcacagatctaccagcaggtggggcagtggaccgcaatgccatcctattcatgaacgaattcaacacgtggagaagccnacgtccccaccc

SEQ ID NO: 5919 - DNA, 118 bp, Zea mays
  misc_feature: Incyte ID No: 700382660H1
  unsure 2, 17, 26, 29-30, 62, 64, 67-69, 75, 113, 115: a, t, c, g, or other
gngtttgcagagctagnggatgtgtntgnntacaagtatgattgctgttacataacaccccngnttnnntcccanattagaacacagttgtgctgtcaatacctcatactgcntnaac

SEQ ID NO: 5920 - DNA, 219 bp, Zea mays
  misc_feature: Incyte ID No: 700382661H1
  unsure 4, 9, 13, 18, 27, 37, 65-97: a, t, c, g, or other
gatncgtanccgncgtgnctcgatttngtcttttccnctctgctcgagtacgagcggctactccnnnnnnnnnnnnnnnnnnnnnnnnnnnnnnnnntgaacatcaccaacgtggcggtgctggataaccccaccgccttcctcaatcccttccagtttgagatttcctacgagtgcctcgtgcccctcgacgacgatctggagtggaagcttatatat

SEQ ID NO: 5921 - DNA, 296 bp, Zea mays
  misc_feature: Incyte ID No: 700382662H1
  unsure 8, 11, 27, 55, 109, 148, 169, 175, 217, 233, 270: a, t, c, g, or other
ctaccctngtngtcgtctcactcaccncgccttcacgcctacctcaccaaataangtcccgcccttttccgacattcacaggggggacaggaaatcagcggccatggcntcgattccggcgacgaccttcgccgtcatcttatccgtnctcttctgtgccgcggctggnaccgcngtcgacaacgacctccccgactacgtcatccagggccgcgtntattgcgacacctgcngcgccgggttcgtgaccaatgtcaccgagtacatcgngggcgccaagggaggctggagtgcaa

SEQ ID NO: 5922 - DNA, 300 bp, Zea mays
  misc_feature: Incyte ID No: 700382663H1
  unsure 13-14, 89, 183: a, t, c, g, or other
ctcaatctggganntatgactgcagaaactggtacttaccgttggatggccccagaggtcattgagcacaaaccctatgatcacaaggntgatgtttttagttttggaattttgatgtgggaactactcacagggaagattccttatgagtacctgactccactacaagccgctgttggtgtngtgcagaagggattacggcctacaattccaaagcatactcacgcaaagctttccgagcttcttcagaaatgctggcagcaggaccctacccaaagaccagattctccgaaatattag

SEQ ID NO: 5923 - DNA, 300 bp, Zea mays
  misc_feature: Incyte ID No: 700382665H1
  unsure 23, 30, 242, 284: a, t, c, g, or other
gctcaagtcgaatctggaatganacttggntttcaggatttttctacaaaccttgcaactatgaactctttgtgaagcaatccctcaacatggagatggctattgtaatggctcgggatggtggcatggattggatcatacatttagacactgatgagttactctatcctggcggagtgctgagtattctgttagacgtttgttagtctgaggtccctcgtgatgtcgacatggttattttnccaaactatgaaagcagtgttgagcgtgataatataaaagancattcagcgaagtatc

SEQ ID NO: 5924 - DNA, 294 bp, Zea mays
  misc_feature: Incyte ID No: 700382668H1
  unsure 284, 292: a, t, c, g, or other
caatggcaccagaaaggatgctcctcggcgtctgtgccgtgctgatggtggtcggcgtcacgaacgcggcggagggccaggtggcgtcggtcgtcgtgggcctggcgaggtgcgccgacagcacgaggaagaacatgaaggctgaggccggtttcaagggtcttcaggtggcgatcaagtgcaagaacagcaacggcgagtacgagacaaaggccgtgagtgagatccaaagctccggagccttcagcgtcccactcgccgccgacctccacggcgcgactgcnacgcgcantt

SEQ ID NO: 5925 - DNA, 291 bp, Zea mays
  misc_feature: Incyte ID No: 700382670H1
  unsure 14, 38, 43, 274: a, t, c, g, or other
cggcgaggtcaggnggcgctgcgacgcctacaacagcngcccngccgtcgccgccaccatacccaagatgtgacgacgctgcgctggtacgacgacgggcgcgcacgtgcttgtctgcatgcggatcgatcgacggccgagctgtctggcacgacgacggcgtgttgatcgagggcctcggctcctcctgcgacggtcacgatggtgttaagatttcgtgccgaaatgtgatatgtttcatgctcgatcaagtaatttattcctaatctgtgtntgcgcaaaagaaagaaa

SEQ ID NO: 5926 - DNA, 117 bp, Zea mays
  misc_feature: Incyte ID No: 700382672H1
  unsure 19, 21, 23, 39, 84, 100, 111: a, t, c, g, or other
caatcatataccaaatctntncntcactaaacgtaagcnttctcctcactctctcaatcttatccatcatagcaggcagttgangtggattaaaccaaanccagctacgcnaaatct

SEQ ID NO: 5927 - DNA, 290 bp, Zea mays
  misc_feature: Incyte ID No: 700382673H1
  unsure 4, 122, 151, 161: a, t, c, g, or other
aggncttcaacatgattgatcagaacagagatggcttcatcgacaaggaagatttgcatgatatgcttgcttctctagggaagaatcccactgatgcataccttgatgccatgatgaatgangccccagggcccatcaatttcaccatgtncctgaccatntttggtgagaagttaaatggcacagatcctgaagatgtcatcagaaacgcctttgcttgctttgatgaagaagcaacaggcaccattcaggaagattacctaagagagctgctacaaccatgggggatc

SEQ ID NO: 5928 - DNA, 291 bp, Zea mays
  misc_feature: Incyte ID No: 700382674H1
  unsure 2, 6, 41, 106, 241: a, t, c, g, or other
ancgcngcgtgctctccggattgttgtgcttgcggagtcgncccgcggcctcggcacgacggcgccggcctccgatccacaccccgccgagcagtggcggaaccanagggtatgccgtatatgccacggcataccggcataccctgcccggcaatccgatcgagccaacgcttggagacgccgtctccgattgaagtaggggagagcggggtgccgggggtcagtttgttgccggtcatcntcctcgtcgtccaaccaggtcatcgcatcgttcagttcactctctgagat

SEQ ID NO: 5929 - DNA, 291 bp, Zea mays
  misc_feature: Incyte ID No: 700382675H1
  unsure 289: a, t, c, g, or other
agaggacttgatcgtaaaggagagagagatgcaggagaagctcatgacaaggcattccaccgttgtcgacagctttgagaagaagctgcgcgggcaagatgtagagaacaggattgctttgcagcagcagaaaattgctgccctgaggcaggaggttgaatctcttttagagtacattagtgagatttgagcaaatgagtgctgctgtggcgtgatacatctttagcgattagactgcctttgtttggtttagggtttaccccaatatggaaatctactactcctgggntg

SEQ ID NO: 5930 - DNA, 292 bp, Zea mays
  misc_feature: Incyte ID No: 700382677H1
  unsure 175, 195, 275: a, t, c, g, or other
gcgcatcttgcaggctggcacgcaggcctagcttctctctgattccctgtagtgagctgtgctttgctttgcggccatggtttgcttgcgagctaatggattggccgtcactcgatgcctctcccttttcgctgttcgtggtcaccaactgccactgactgttggatcatccgtnagactgacgaaacgtgaaangcattttgcaccgtcgcttggcttaacaaatcatcgtcaaagacactgaaatgactggtctaaatatacatggggattangctttaggggatgtttg

SEQ ID NO: 5931 - DNA, 281 bp, Zea mays
  misc_feature: Incyte ID No: 700382679H1
gctcatcctgggacggccgggtagtgaaatggaccagcgcacgtgatgaaggggcttctgatgtcgattgagttgagtcgaccgtgcaggtgcagcgcgagtgatctttactgttcgtggttgtgggctaaaaaaaaacatacccaatcttgcactaaaaaaaaggagagtaagcacagctcgtaataaagaaagaagatcatgtgttgcagtggtaatttgtaaatgtaaatactgaactgaaaccatgtgggcaggaccgagtgcataagcacctttgg

SEQ ID NO: 5932 - DNA, 298 bp, Zea mays
  misc_feature: Incyte ID No: 700382681H1
  unsure 2, 4, 17, 21, 44, 181, 224, 281: a, t, c, g, or other
antngttctagatcgcnagcngccgctcggatctagaactaganatgcactacccgtccgcggagtgcgcgtccgcgtttctctgctccccgatcaagaagcacttgttagaccacttccacaaggcacccctgccggtgccggagtaccacccggtgcctgagcacagcaagccggtgcnggagtaccacccggtgcctgagcatagcaagccggcgccggantaccaccctcccacgccggaataccaccctcccactccggtgtacgggcagccaaancaactccgatctaccat

SEQ ID NO: 5933 - DNA, 294 bp, Zea mays
  misc_feature: Incyte ID No: 700382683H1
gagaagacaatggtgcagcatctggtaatgatagggagaggtatgatttgaagtccacccaaactgcttacactagtaaggcacagttggttcagaattcaacaaacacacaggaggagaaagtcacaaaagtctcacctcctcggagaaaggcttataaagaagacaaatctgatcggcagggcaactacgtgaaaaaggataatggtcctgagacaggtcggactgggtataagatacaacaggcaaagcagctgcaacagcagcaaaggccaactctgcttcagcttcgtc

SEQ ID NO: 5934 - DNA, 289 bp, Zea mays
  misc_feature: Incyte ID No: 700382684H1
  unsure 9-10, 29, 120-123, 180, 274: a, t, c, g, or other
cccaactcnntgattctggcttattactnagagagaatgctagtaatggtggtcctggctacactaggtccaggcctgttgataatgtcatttattcccaatttatatcaactatgtggnnnntgctaaagatccttacccaagaattgcaactattggtcggagagcactgtcccttanaggtgttgaacaagtagtcatgaaaaatactagatttaatagtggaggtgcacatcggggagagacatctgcttcaaactttggaatggcacgncttcatcctggcttg

SEQ ID NO: 5935 - DNA, 290 bp, Zea mays
  misc_feature: Incyte ID No: 700382685H1
  unsure 29: a, t, c, g, or other
caagaccctggcaggtcaggggccctggncaagccagatctggagctgctgctccctgctgcggagaccgcggaggcttcgcgttgaccaagttccttaaagaactggctgatggggcaggaggtccaggcctgggctctcgggccctcctagagggccattggagcttgcagctcagacccccactttgagttttatttatttaaatagtagttggatgcttggcacgtcgtcctgtaataggaaacccttgcctcatcagttttcctgattacaagtgcaatatttta

SEQ ID NO: 5936 - DNA, 246 bp, Zea mays
  misc_feature: Incyte ID No: 700382687H1
  unsure 54-55, 161, 183: a, t, c, g, or other
ggccgtctctggagagcagcagccatggccctacgctaccctatggccgtgggnntcaacaagggccacaaagtgaccatgaacgtgagcaagcccaggcacagccgacgccgcggggtctgaccaaacacaccaagttcgtgcgggacatgattcgggangtgtgtggctttgccccgtatnagcggcgcgccatggagttactgaaggtctccaaggacaaacgggcactagttctagatcgcg

SEQ ID NO: 5937 - DNA, 289 bp, Zea mays
  misc_feature: Incyte ID No: 700382688H1
  unsure 4, 58, 67, 75, 121, 177, 188, 191, 279: a, t, c, g, or other
ggtntgccaatgatcacccttccactagagaaaatggcaaccagagtagctggttccntctgcgtantactgggnttggggaggagatgattgttagcagcatgaagaagtatgaagatanagcagtagaactagcgctgaatccggtgaagcttcaagcgctgactaacaagctcnaggaagttcgnatnacctgcccgttgtttgatacagctcgatgggtgcgcaaccttgaaagggcatactacaagatgtggaacctttactgctccagtcgcnacccggagcc

SEQ ID NO: 5938 - DNA, 231 bp, Zea mays
  misc_feature: Incyte ID No: 700382689H1
  unsure 47, 126, 156, 188: a, t, c, g, or other
gcaattatattaatggtggagacgacacatatatctgggcgtttgtntgccttcccagctggtttagagcactgtaatattattagatataacagggcgttatgttgtatttttacatcactatancttaccatgaggtcctttctcctctgtgangggtcaggcattgtattggaaccttgtacggngtttgcctttttaatgcaatgacatacactactcgcaccagat

SEQ ID NO: 5939 - DNA, 287 bp, Zea mays
  misc_feature: Incyte ID No: 700382690H1
  unsure 174, 212: a, t, c, g, or other
ggcgggccatctgagcgaccaaacacacctcacctgcaggcaattcggagctccgttcagtgcatggctgacactctccagagagtccagaaatgtctgtcagaacagatgaagccagaagagcaagctctagacatgctggtgtcacatttgcaaggaaccggtgccgaaggncctggaacagatcgcccgtatcttggacgagagcgcanagctgccagctccgaaatcggtggcggatcgcccattctctagagtcgtggagcgcgcctggtgatgagaagaat

SEQ ID NO: 5940 - DNA, 291 bp, Zea mays
  misc_feature: Incyte ID No: 700382691H1
  unsure 29, 32-33, 82: a, t, c, g, or other
cgaaacaagtgcacacaaataaatacctnagnncgctagattgccaagagcaatggcctttaggtcatccatcctgctcgcnatggtggcgctggctacgctattcgcggtcggttcatgcaccaccccgctcaccttccaggtcggcaagggctccaagcctggccacttggtcctcacccccaacgttgccaccatctctgacgtggagatcaaggagcacggtggcgacgacttctcctttacgctcaaggagggtccgactggcacttggacgcttgacaccaagac

SEQ ID NO: 5941 - DNA, 287 bp, Zea mays
  misc_feature: Incyte ID No: 700382692H1
  unsure 80, 86, 99: a, t, c, g, or other
agacactgcattgattgacatcgcgtgtctatcggctaacagggcgtaggctctgcgacggaatggcgcccctgggggcnattgcngccgccgccagcnctggtcgcctgcctccggttaggagggttctccattcttcctacgcgtgctggactagcgctcctctccgtggtggcctcgggtcggccctccccacggcggactcggtgtccggcccccaaaccaaaccttttctggaggcggtggatttggttgagcagctggcgaggcattctctaggctttgac

SEQ ID NO: 5942 - DNA, 298 bp, Zea mays
  misc_feature: Incyte ID No: 700382696H1
  unsure 2-3, 9, 33, 51, 85, 95, 105, 109, 111, 138, 178, 216, 247: a, t, c, g, or other
anncatccnagcaggcatggattcatggacctnccaatggccagccagttngagacaggtggccactattctaccttgccagttntctgacttanatgtctccanttcntngagcctgatactaggagcctcacaggntgctgtttccctgtgtccaatgttgataagcaatgtaganaaaccctggggccattttacttccagaaccgtccagantgtggtatagtatctggccaacaggagcctntggaagggcctgggcttctgtgtaacttgaggcctagctgtctacctccag

SEQ ID NO: 5943 - DNA, 184 bp, Zea mays
  misc_feature: Incyte ID No: 700382702H1
  unsure 33, 61, 70, 128, 133, 150, 154, 158, 169, 171, 177, 179: a, t, c, g, or other
aagaaacaagcgcacaagatcaaatacctcgcngccaataatggcctccaggtcctccatnctgctcgcnatggtgatgctggctgcgctattcgccgttggtttgtgcaccacccccctcaccttcnaggtnggcaagggatccaagcntggncagntgatcatcacnanggtgtngnagaat

SEQ ID NO: 5944 - DNA, 231 bp, Zea mays
  misc_feature: Incyte ID No: 700382705H1
  unsure 40, 56, 178, 181, 188, 198, 204, 209, 213, 225, 229: a, t, c, g, or other
ctctcatgcgtgcggtagtaaaccctagcggctggatggngtttagttcgccccgnttcctgctgatccggctgggttccctcgttggttgattcctacttcctagggggacgaatgggcgcggagacggtaggcctaccgacactcctgcgggagatccaacggatcgacaccatcnggntctacgnaggttggaancattgnttggnatcnggatgatgaggntttnca

SEQ ID NO: 5945 - DNA, 299 bp, Zea mays
  misc_feature: Incyte ID No: 700382707H1
  unsure 28, 238-239, 248-250, 252, 254-255, 273, 282, 290-291, 293, 298: a, t, c, g, or other
ggagccgtgtcatctttgcatggttggnatataggcagccgcaactgctactgctcgatgagccgacaaatcatttggacattgagaccattgactccctggcggaggcactgaatgagtgggatggtggtttggtcttggtgagccatgatttcaggctgatcaaccaggttgctcaagagatttgggtgtgtgagaatcaggcggtgacaaggtgggaaggtgatatcatggattnnaaggcactnnnangnnaagtgctgtttttgttanagggttttnacaaaaannanttttnt

SEQ ID NO: 5946 - DNA, 311 bp, Zea mays
  misc_feature: Incyte ID No: 700382708H1
  unsure 215, 302: a, t, c, g, or other
aaacaaagccacaacacatacaggaaagcaagcaagaatcatcggaataatggcccgtgcatgcgtgttcctgcgtcgtgctcctcctggccgccatcgcggtggcaccgttcgcgggcgccgcacgcgtggacgttgtggagggtaggtccatggcatccgccgatgcaccggaggcggcggccgatgctcccgctcctagccccgactccgcntcatccccagactcgtcatcggaggcgccctctagcagcagttcctccgactagacgcaaaaacctcttcattctctggaataactnacagtatat

SEQ ID NO: 5947 - DNA, 309 bp, Zea mays
  misc_feature: Incyte ID No: 700382713H1
  unsure 22, 33, 38-39, 71, 79, 98, 115, 148-149, 155, 163, 178, 181, 193, 208,: a, t, c, g, or other
ctccaagtcccagcgaacccgngtgcaacctgncccgnnctccacgccgcctcttcagctcgccatggatnccaactgnctcctgcgccgccggtgantcctgcacctgcgccgnctcctgcaaatgcacagagtgcagatgcacctnnctgcangaaaagcngctgctcctgctgcntgngggtgtgcagantgtgccgcagggtgnatctgcaaaggggcgtcggacaagtgnagctgctgcgcctgatgctgggacagccccgctnccagatgtaaagaacgcgacttccacaaacctggattttt

SEQ ID NO: 5948 - DNA, 115 bp, Zea mays
  misc_feature: Incyte ID No: 700382714H1
  unsure 34: a, t, c, g, or other
ctattttgttgttacatgttaatattgctttgtncatccttatccacctactatagctatttgcaatcacaaaatcacttgatggcggtcagcctagagttatcaagctgatatt

SEQ ID NO: 5949 - DNA, 187 bp, Zea mays
  misc_feature: Incyte ID No: 700382715H1
  unsure 2, 6, 8, 23, 73, 76, 80-81, 90, 107, 114-115, 123, 127, 132, 135, 156,: a, t, c, g, or other
ancgancncccttcgaccttgcngaagggagtccgaactagtctcaggcttcaacatcgaatacgccgcaggnccngcgnnctaatctancatagccgaatacacanacattannataataancacnctcancantacaatcttcctaggaacaanatatgatgcantctcccctgaantctacaca

SEQ ID NO: 5950 - DNA, 256 bp, Zea mays
  misc_feature: Incyte ID No: 700382716H1
  unsure 21, 34, 38, 53, 208, 210, 215, 222, 225, 227-228, 236, 241, 243-245,: a, t, c, g, or other
cgttcgcgagctaccacagtnccggtgcacgggncgcnataccccgactgagnatcaagctcatcaaaggcacggacgcctccggcgtgggcgacgacagcatggagtgcgtgtacacggtgttcatccggacggggtcgatcctgaaggccgggacgacgcgaacgtcacgctggagctggccgccgcggactgcaacggcctcggnantctcngaccttnccntnntgggtccnctcgncnnntnnnnttnnct

SEQ ID NO: 5951 - DNA, 234 bp, Zea mays
  misc_feature: Incyte ID No: 700382718H1
  unsure 133: a, t, c, g, or other
ggaagatcgcactgagcagttcttgaatgttctacagagggagataggtgaagttgaaaagaacaaagacgctttcctggcagacttcacccaggaggactatgacgacattgtgaatggctggaacgcgaantgaaacggagctctgccggcgagcagaggtgggggttgttcattgccaccaagtgatttggcctgggcagcaggagggctcttcggaataagaatggatgt

SEQ ID NO: 5952 - DNA, 307 bp, Zea mays
  misc_feature: Incyte ID No: 700382722H1
  unsure 73, 125, 200-201, 213, 221, 243, 247, 250, 261, 265, 268, 278, 281, 288,: a, t, c, g, or other
cactcctggtgttattaaaaaggagatgcataagctggacagtatgatgatgaagaatgttaggagcgctatncggcagtgcggactgtgtgcttgttgttgctgatgcttgcaaaactcctganaagattgatgaaatgcttgaagaaggtgttggaaacaaagatattggacttcctgtactgctggtattgaacaannaagatctcatanaacccggngaaatcgcaaagaaacctggantggnccnaaaatttcccnaggntgngaggtgttanccnagggggnaaanggngcnngggggcgg

SEQ ID NO: 5953 - DNA, 299 bp, Zea mays
  misc_feature: Incyte ID No: 700382724H1
  unsure 70-94, 141, 258, 268-269, 275-276, 281, 285-286, 298: a, t, c, g, or other
ggagtctaattcatgttccaattgagctcgggaacgaccggttgatggccatggccatcggggaacgcgnnnnnnnnnnnnnnnnnnnnnnnnnagctccgccgctagggagcgtgatggccatcaccgtcgccctgtgcnttggatgttgcccggcacccacggatgggtcaggaccactcgccggtgcgtgtgggtgctcattggggcttcggcgggctaggagcgtcgtgggggtggtggaattcctcgccgganagggattgcnngcgganngctgntacnnggcaatgaaaant

SEQ ID NO: 5954 - DNA, 306 bp, Zea mays
  misc_feature: Incyte ID No: 700382725H1
  unsure 2, 5, 12, 15, 22-23, 37, 72, 129, 137, 169, 183: a, t, c, g, or other
cngangcgggangcntgcattnncttgcgcgggacgnacaaactgccacgctacacagttcacacgccaagngagggccgcatctagatccgcgccgccgagctgacttgactattgcaagtttgcaanccaccgcnacgccttcttctccccccggcccgcgatctanccggcacgggcgcngttgctgctactgctattactaatactactaccacgtcgtagcggaggcagggacttgaggagcgggtgggttgcgatgtccgccgcggtgagggatgcgggcgtcctcgcgtcttcgacgtc

SEQ ID NO: 5955 - DNA, 300 bp, Zea mays
  misc_feature: Incyte ID No: 700382727H1
  unsure 220, 269: a, t, c, g, or other
gtgactactcactaaagggtgaactgacctatggtaaagttggtgaatggcgatttgacaaaagatcattcccagataggccaccaccaagaaatcttacattgcccctttctggtactccaggagggggcaatgtagctagtgcaaaccttcctcggtgggatgatggaatataaactttggatgatgtcaattatatcttaggttcctttgatctgcnttgtatatggggaatatcaaagtatcaggtgcagtcggttgtttggtanacatccaaaatagctgcttgcacttgcacac

SEQ ID NO: 5956 - DNA, 304 bp, Zea mays
  misc_feature: Incyte ID No: 700382728H1
  unsure 39-40, 236-237, 281: a, t, c, g, or other
actgttgatgtcagctatgttagtagccggtcatggtannacctcaatttattcggcttgaggggtcttttcagtctgatccttggtgaagaaaacgcaactgatgatgcacagaagatgatgcaaatgggtggtggatttggatttaacccaacaatgagtttgggagcagagaaagacagcctggatatcatgcagcatgactgggctctacctaagatggagcggcacgcagnngatgtgttgaaacagttgctgaagaaatgactcgaacggttggncttctggggagcaacactcgcgt

SEQ ID NO: 5957 - DNA, 265 bp, Zea mays
  misc_feature: Incyte ID No: 700382730H1
  unsure 26, 35, 49-50, 69, 85, 144, 160, 177, 182, 212, 222, 230-231, 239,: a, t, c, g, or other
gagactttccacttcaaaggccacgngcacctaanccttctgggatganngcctccaggaccatttatnaggcctggatctatgngtctcccaagattttacccagcagggagagcacgtggaattccacacagatttgctggncctgaatcttatcagnacatggggccacagagnatgantgttcaggtaactcaacacagaactgatcnaagatggccnaaggacannggtttttngnnccnnagnggngggcccctttggg

SEQ ID NO: 5958 - DNA, 249 bp, Zea mays
  misc_feature: Incyte ID No: 700382731H1
  unsure 9, 33, 35, 39, 46, 48, 53, 72, 85, 96, 109, 115, 120, 133-135, 150, 170,: a, t, c, g, or other
cttgcactnaaaatcatgcttaaatggttgatncncccnatttcgntntttanaaataagttaattgctttngcaggttgacacnctcacctgacngatgatgtaatgncttcantttcnataatcttaaaannnctaaatgttatattngtaaatacagtacacatttnattncttggatttngagagacattgtnaatntggggggaantggcattgcgaaagactnnatgcnnagtgncgctttnt

SEQ ID NO: 5959 - DNA, 234 bp, Zea mays
  misc_feature: Incyte ID No: 700382734H1
  unsure 17, 112, 186, 203, 214, 218, 226, 232: a, t, c, g, or other
gtcaatgagtgcttgtnttcctttaaacagtctgacatatttactcgtcactttcaaaccagaagcatgaaaggaaggagatattgtggggtccgtttaactcgatagaaancgcagggggatggcccccggcgcaggctcttgacccgctcagcgctgaccccaccgccctggccgaggcacttngccttgctgagctgganttcctccttcntccncctcatgnatggantg

SEQ ID NO: 5960 - DNA, 208 bp, Zea mays
  misc_feature: Incyte ID No: 700382735H1
  unsure 22-23, 28-29, 113-114, 120, 122, 177, 180, 190, 202: a, t, c, g, or other
tttctgggaagttctgaatttnntttgnnatccttttttccttcaagcattttgcagtgagcttcttttatatatagcaaacaatttgaaagaatacaaaaatatgtgaagtnnctttananaaataactacagtatagcgctggtacagtacactaaaagactttgataaaaaganacnataataaaangcctccatttanaatgtc

SEQ ID NO: 5961 - DNA, 206 bp, Zea mays
  misc_feature: Incyte ID No: 700382736H1
  unsure 28, 32, 52, 75, 87, 193, 201: a, t, c, g, or other
caggactgggcttagctgtccagagccntgcnggagggtgctgggggctgtncctctgcaggcactgtgttttcntcaggggctgtnctcagaacacccctcctgctccctggggctcctcagggagccatttcagctggagtctcaggtctcaaaaacaacttctccaggaggccaaaaaaagttgggttgncttcggcnccaaa

SEQ ID NO: 5962 - DNA, 305 bp, Zea mays
  misc_feature: Incyte ID No: 700382739H1
  unsure 45, 95, 263, 265, 280-281, 284, 289-290, 296, 300-301: a, t, c, g, or other
cacacatccgtcaaagaaacaagtgcacacaaataaatacctggntcgctagattgccaagagcaatggcctttaggtcatccatcttgcttgcnacggtggcgctagcaacgctattcgcggtcggttcgtgcaccaccccgctcaccttccaggtcggcaagggctccaagcctggccacttggtcctcacccccaacgttgccaccatctctgacgtggagatcaaggagcacggtggcgacgacttctcctttacgctnanggagggtccaattgnnacntgganntttganacanngacc

SEQ ID NO: 5963 - DNA, 306 bp, Zea mays
  misc_feature: Incyte ID No: 700382740H1
  unsure 26, 39, 47, 53-54, 110, 129, 147, 156, 160, 185-186, 191, 203, 216, 231,: a, t, c, g, or other
gccatggcactgttcaagtgcatgtncatcttcttagtntcgcttcnactcgnnctcaccttgcaccaatgcccaggaagaatcttcacatcggactctcccaccgttcncctgcatcccaggccagcnacggcccccgcggttgcnaccttggcncgcnggcaccaaccgagtgctagacgtgnnctgtngggaatgatgcngtgcgcggacttnatcacccacaacgantngcaccgatgccacccagggtcgcntgttgngatggtntnaggnnattngtgaacgangggtnattttgtnngg

SEQ ID NO: 5964 - DNA, 236 bp, Zea mays
  misc_feature: Incyte ID No: 700382741H1
  unsure 9, 12, 20, 23-24, 32-33, 52, 56, 59, 64, 73, 88, 121, 135, 158, 167,: a, t, c, g, or other
gttaatttnttngcctaggncgnntgagcaannaagacattgaacgtatggnccangangctgnggaagtacnaagctgaagatgagnagcagagggacaaggtgtcatccaagaattcanttgagtcctatgcnttcaacatgaacgcaactgttgnagatgaganacttcagggcaagatnancgatgaggacananagaagattctngacaagtgtaatgaaattatcanctg

SEQ ID NO: 5965 - DNA, 305 bp, Zea mays
  misc_feature: Incyte ID No: 700382744H1
  unsure 7-8, 24, 28, 32, 34, 76, 104, 142, 154, 164-165, 180, 216, 222, 278,: a, t, c, g, or other
accacgnngtcatcaccagcagcnagtncctncncgcgcacgcgctctcccccgacgacctcgtcgagcgcgacgncctcatgtaccgctcctacatcgccatnggctcctaccagctggtgatcggcgagatcgggcccancgcggccacgcngcttccaggnngtcaagctgctcgcngtgtacctctccggcgacggcgggaacagggaatcngtggtntcgaggcttcgtgagctcctgtcagacgcggcggtcgggagcaatccgattctccnggtgatggccggcacngtcttcatgna

SEQ ID NO: 5966 - DNA, 223 bp, Zea mays
  misc_feature: Incyte ID No: 700382748H1
  unsure 19-20, 22, 75-104, 158, 171, 194, 201, 209, 214-215, 219, 221: a, t, c, g, or other
accgcaaccaccttcccanntntcagtagtcgcctctcgtcgtcttcgtctagcccggcccgttccaaaaccttnnnnnnnnnnnnnnnnnnnnnnnnnnnnnnaagatgatctccccggacgcagcccgcaacgtagtcggcatcatcggcaatgtnatctccttcggcntcttcctgtccccagtgctgacnttctggnggatctanaaggnnaagntngg

SEQ ID NO: 5967 - DNA, 229 bp, Zea mays
  misc_feature: Incyte ID No: 700382750H1
  unsure 21, 30, 40, 103, 109, 111, 138, 148, 167, 180, 225: a, t, c, g, or other
gttagatcacttccacaaggnacccctgcnggtgccggantaccacccggtgcctgaccacagcaagccgccggtgccggagtaccacccggtgcctgagcanagcaancnggcgccggagtaccaccctcccaagcnggaataccancctcccactccagtgtacnggcagccaaagcnaactccgatctaccatcctcccgtgagcatgagttcgttcagcanggaa

SEQ ID NO: 5968 - DNA, 206 bp, Zea mays
  misc_feature: Incyte ID No: 700382752H1
  unsure 11, 17, 28, 37, 91, 106, 125, 172, 187, 190, 193, 196, 200-202, 204: a, t, c, g, or other
gcgtgtctagntgacantgatgcaaggnttgcattanacccaagtgacaagtacaaaattcagacaaagccacatgggcatggagatgttnattctcttctttatncaagtggcttgcttgaacnatggaagactgaaggacggaagtgggttctctttttccaggatacanatggattgcattttnaangcngtnccannngnat

SEQ ID NO: 5969 - DNA, 231 bp, Zea mays
  misc_feature: Incyte ID No: 700382753H1
  unsure 32, 46, 195, 216, 219, 223-224: a, t, c, g, or other
gcaaaaaggtgacattccattagataattcgntgcttaggcaagtntcaagcctcgtaagaaggctaccagctatggagtcacagaaattccaagacgacttcttaatggaatacaacgacactctcctcatgacctaccttgcaatggtcactaaatgttcaagcacaatgaacgagttggtcgagaagataancacgagctatgagagaacggntancagnncagcggt

SEQ ID NO: 5970 - DNA, 230 bp, Zea mays
  misc_feature: Incyte ID No: 700382756H1
  unsure 25, 51, 60, 62, 79, 83, 113, 145, 169, 172, 184, 192, 200-201, 223: a, t, c, g, or other
caaagcataaatgggcatcacaagnacataaccttcaggtgtgctgatgtnacatctaanancttgaagattgaagatnactntgttgatctgatattttcaaactggctatnaatgtacctttcagatgaggaggtccaaaagnttgtggggaaaatggtaaaatggntanaggtcggaggcnatattttntttagagnntcatgttttcaccaatctgganattccaa

SEQ ID NO: 5971 - DNA, 300 bp, Zea mays
  misc_feature: Incyte ID No: 700382757H1
  unsure 6-7, 12, 20-21, 32, 47, 83, 86, 97, 146, 167, 176-177, 203, 205, 209,: a, t, c, g, or other
agcaanntagtncacatganntgtatcatatntgaagtgtggttttnctcaaaatcattgactttaaggagctcatttctgancanaaaggtttgcnctgtggaaaaatcaatcactgccaggattctttgatttctgtactattntgtataattgaatttgttcanttctctcannccagcaagtgttttacaggtgccttngnttanaacaaaattganntccagaatttttatgtaagtcattgtgtctatgntgccncntgtaaaaggnanatgcnatngcatantngctatatcc

SEQ ID NO: 5972 - DNA, 300 bp, Zea mays
  misc_feature: Incyte ID No: 700382760H1
  unsure 77, 159, 228, 276: a, t, c, g, or other
cccaggtccttcctttaggtctggttgttgcacccaactgcttggttggctggcagctgagagccctgctgtggganagcgaagggggtcaaaggaagacttgaagcacagagggctagggaggtggggtacatttctctgagcagtcagggtgggaanaaagaatgcaagagtggactgaatgtgcctaatggagaagacccacgtgctaggggatgaggggcttcntgggtcctgttccctacccccatttgtggtcacagccatgaagtcacngggatgaacctatcttcaagtggc

SEQ ID NO: 5973 - DNA, 253 bp, Zea mays
  misc_feature: Incyte ID No: 700382762H1
  unsure 32, 74, 84, 133, 233, 240, 243: a, t, c, g, or other
cttgtacggtactggcagaaaagtcatttttnaaaagccataggcttttccttgcccttagctgtaataatgcncctgattttnatttcctccagagctgtgtttctgtccatcacctgtgtattggccctgngtttaccactctggcccactcctcacccccttgctcccctggtcttctggagtttgtgacattgatttgaaatggatggtgttctcttgagagcaagtgngattgtnagnatggcgcaca

SEQ ID NO: 5974 - DNA, 203 bp, Zea mays
  misc_feature: Incyte ID No: 700382767H1
  unsure 180, 184, 190: a, t, c, g, or other
gtactacacgacacgtactacgttgtagctcacttccactatgtcctatcaataggagctgtatttgccatcataggaggcttcattcactgatttcccctattctcaggctacaccctagaccaaacctacgccaaaatccatttcactatcatattcatcggcgtaaatctaactttnttcncacaanactttctcgggct

SEQ ID NO: 5975 - DNA, 136 bp, Zea mays
  misc_feature: Incyte ID No: 700382769H1
  unsure 3, 61, 65, 73, 75, 88, 96, 110, 114, 131, 134: a, t, c, g, or other
gangaggaacccagccagtatcctcagtcctcaggctgctcacagttcgtgctatcagatncgcncttcacgntngctctgcctgctncggcaatncggcatggcgctcnaggncgcgacgtccttcctcnccnca

SEQ ID NO: 5976 - DNA, 205 bp, Zea mays
  misc_feature: Incyte ID No: 700382770H1
  unsure 53, 69, 91, 115, 129, 148, 152, 160, 198: a, t, c, g, or other
gaagtcaattgcagccagccgtgaagagagtgatgtctttgttacgaataatnatgggaacatggccanagttttagctggacggaggcgntacatgggccacaagagaactatncggcccgaatgcanagaaactcaatgtactatntcanacacggantcaattgagctgggataccttttcacggaaggtacagngagttcg

SEQ ID NO: 5977 - DNA, 294 bp, Zea mays
  misc_feature: Incyte ID No: 700382772H1
  unsure 2, 26, 70, 74, 84, 161, 163-164, 168, 261, 263: a, t, c, g, or other
tngctgagccactggaacctgctctnagtacctaaccgaggtcaaaatcatcattggtccgaaatatggncttntttacaagtnagctgggtttctcgtgatggtaaaaactagactgacattacttggccgcccattagttgctttatctttcgtttatntnntttnttgttggaagtgaggcagtagggttgctatggaaatgaatagatggagaagcatttagcagacatataatatatgctagacttttgagttgcntngttttgggaagaacttggaattttcagtttg

SEQ ID NO: 5978 - DNA, 300 bp, Zea mays
  misc_feature: Incyte ID No: 700382773H1
  unsure 27, 32, 229, 267: a, t, c, g, or other
gagatcgcgagcagccggagccggagnccgangaggatgaagacgttcgacccgtggccggtcttcttccgccgggagtggaagcgcaactggcccttcctcacggggttcgccatcaccggcttcatcatcaccaagatgacggccaacttcaccgaggaggacctcaagaactccaagttcgtccaggaacacaagaagcgctgaccaaccgggagtcgtccgaatngcctgcggatgaaaaattagccccctatttatcttgtntttttttttatctagatgcgtgcactctattgt

SEQ ID NO: 5979 - DNA, 298 bp, Zea mays
  misc_feature: Incyte ID No: 700382774H1
  unsure 11, 210: a, t, c, g, or other
tgagggttttntcataaatgagggctgcacattgcctgttctgcttagaagtattcaataccgctcagtattttaaatgaagtgattctaagatttggtttgggatcaataggaaagcatatgcagccaaccaagatgcaaatgttttgaaatgatatgaccaaaattttaagtaggaaagtcacccaaacacttctgctttcacttaantgtctggcccgcaatactgtaggaacaagcatgatcttgttactgtgatattttaaatatccacagtactcactttttccaaatgatc

SEQ ID NO: 5980 - DNA, 296 bp, Zea mays
  misc_feature: Incyte ID No: 700382776H1
  unsure 49, 120, 235: a, t, c, g, or other
gtgaaaatgaaattggtgcaagagcagaaaatcttttggatacactagncaataatgaaaataatggtgatggcttccttggagagaagattcaagagctgcggcacgctacaagggatnagatgcgtcgccgtgctcttgagaaaagagtgatgctacttcagggaatgggaatgcgccaagaatttgcttctgatggaggtagacgtattgttgtatctcagcctacaattgnaggtttggatgatgtggaagaagagaggatggtgtagcctgtatggtttgtagagaaggtc

SEQ ID NO: 5981 - DNA, 207 bp, Zea mays
  misc_feature: Incyte ID No: 700382778H1
  unsure 206: a, t, c, g, or other
agcgtgggagattagaagggcaaccttttttgtataagacaagctgtaatggtttatttacttagatccggtaaccatgcctggttattccttgtatttggtcagacacgccgcgcattacacatcccaagtttttaccctcgacgtggtctgtcctgataaatttccttccctgatatttttttttgccctttccaaaaaaaaana

SEQ ID NO: 5982 - DNA, 177 bp, Zea mays
  misc_feature: Incyte ID No: 700382781H1
  unsure 11, 14, 27, 38, 48, 55, 65, 77, 120, 135, 141, 166-167, 171, 176: a, t, c, g, or other
actctggactngtntcgtcttctcttntcgcgaatggnggcgctgtgngatctcngtcgctgccncctccgccagtnatttctgggacgcgcgacgaacacgagttggaaggaggtggtngtgctttgggcggcnaaggantgggcgctagcagcctcagaccctnnacanatcana

SEQ ID NO: 5983 - DNA, 200 bp, Zea mays
  misc_feature: Incyte ID No: 700382782H1
  unsure 2, 108, 179, 186: a, t, c, g, or other
tntatttctggggtattttcaaccacaagaaggaaaaccagctctttgggagctggatactgattactatcttcatgtgacgacagctggggatgatcttatgtctgntagctaccacttgagttctgcacctggaaataatgtgttcatggggtctggagctgcaatgaaccctgggnccatatngggccctgtcccag

SEQ ID NO: 5984 - DNA, 178 bp, Zea mays
  misc_feature: Incyte ID No: 700382784H1
  unsure 9, 22, 31, 35, 55, 57, 76, 93, 132, 140, 145, 150, 152, 154, 176: a, t, c, g, or other
gtcagaagntacaacagtcaantttcagctntggnttctgctacatctaaatgcncnaatcttccgagaagatgcnattacttacctaatccntctccataccaagtttggagtaggtcatttgcttcaganaacggagncaagnttgangntnttgtgcccttcatgggtgaatntg

SEQ ID NO: 5985 - DNA, 198 bp, Zea mays
  misc_feature: Incyte ID No: 700382785H1
  unsure 60, 83, 113, 117, 126, 144, 171: a, t, c, g, or other
aaaattatacacttgctggccagctctcaccgtgtcatcatcatcctcgtcttctgtgtntgagtaggtccaccattgttgcnctctgccatttataataccgttcccttgcntaancattccatntagtttggtgaactcganccactggagcaagcctgaaccccaggntttagcactggttggagctaggattgt

SEQ ID NO: 5986 - DNA, 204 bp, Zea mays
  misc_feature: Incyte ID No: 700382794H1
  unsure 45, 64, 70, 74-76, 85, 96, 105-106, 109, 181, 188, 193: a, t, c, g, or other
cttcaacccacccaccgtgggttcgtccagccttccggccttacncaccggtggtcatcacatntccccnaatnnngccggcccntccgacctcgnccgtactcnnctngttccgttgaagtaagcctcttcatctgctcgccgcagttcgtccgttgcccatggcggatgaggaggtaantgatccnaaggngttcctagagg

SEQ ID NO: 5987 - DNA, 295 bp, Zea mays
  misc_feature: Incyte ID No: 700382802H1
  unsure 33, 57, 62, 74, 96, 243, 249, 285, 293-294: a, t, c, g, or other
ctctgttcctagcctcgcttcatgccacagtcnttatcaagtgctctcctgctcgcnacttncagtccttccancagcttcacacacacccagtcncgcccgcctccatcccagccagccctagagttgagcttagtgtggatctgctttgtagccagctctcctcacttaacaggtatttctccaaaaacctaagaaccaaagtcttccgttgcaacttgggatggtgataggtgtgtcccnacccanatctcatctcgactgtaatccccccatgctgggggnggggggcnna

SEQ ID NO: 5988 - DNA, 294 bp, Zea mays
  misc_feature: Incyte ID No: 700382803H1
  unsure 5, 37, 113, 254, 267, 281: a, t, c, g, or other
ctcanacaatataatctatagttctgtgttctctatnttacacgattcactgaatacaactttatgcactatccaagaagtactgtgcaaggactgcaccttcacagaaaaantgtgggacaagataatgaactgggccaacctctcattcttacaaggaactcagaattcaggatcgctatatacatggtggaaaagtctgaggaatcgctgcagtaaagatacaagaaaattttttgatggcctatgatatnttttggtggcacnttggttggagagantcgtcgagtgcac

SEQ ID NO: 5989 - DNA, 290 bp, Zea mays
  misc_feature: Incyte ID No: 700382805H1
  unsure 41, 252, 255, 261, 268, 274: a, t, c, g, or other
ctgttcgatgctcagctcacccctttgggttggaaccaagnccgatggtctgcgggagcatgtgaagaaaagtgggcttgcagagaagattgaattggttattacttcccctttactgaggactatgcaaactgcagttggggtctttggtggtgaaaagtatactgatggtgtaaatgcacctcccactaatggttgaaaatgcctggacacatggacgtcccagctgtttcaatttgaatgccccccttnatngcattnaaaccgnagaganaattgggtgtccaccc

SEQ ID NO: 5990 - DNA, 287 bp, Zea mays
  misc_feature: Incyte ID No: 700382807H1
  unsure 60, 86: a, t, c, g, or other
gacacactgatgtcttgattcgataacgacacatcttggaattggctcctatgctgaatngtctgaggagaaacgccaggattggntgttgtcctgaactgaggggcaaacgtccattgtttggttcagatcttcctcagactgaagagactgctgatgttttaggcacatttcatgtccttgcagagcttcctgcagattgctttggcgcgtatatcatctctatggcaactgccccatccgatgtgctgcggtcgagctttgcagcgtgagtgccagtaaaacat

SEQ ID NO: 5991 - DNA, 292 bp, Zea mays
  misc_feature: Incyte ID No: 700382808H1
  unsure 10, 37, 138, 266-267: a, t, c, g, or other
ccagcctggnccggaaagtgttccggctctgtaagtncgtcaacgatctgcacgctttgatcagccctcctgccaaggggactccgctgcccgctgatcctactcgggaagtccaagaacgcgatgctgtcgactttnctcttcctggaccagatcgtgtgggcggggaggacaggaatatacaagaacaaggagcgggcggagtttctcgggaggatagcgttctactgcttcctcggctccaacacctgcacggccatcatcgnnccaccgagctgcaaggctgtccacg

SEQ ID NO: 5992 - DNA, 292 bp, Zea mays
  misc_feature: Incyte ID No: 700382809H1
  unsure 28, 33: a, t, c, g, or other
ccagcgcaggggcttctgctgagggggntgcgncagttgaggaaaccgcagataagtttttttctctttgaaagatagagattaatacaactacttaaaaaatatagtcaataggttactaagatattgcttagcgttaagtttttaacgtaattttaatagcttaagattttaagagaaaatatgaagacttagaagagtagcatgaggaaggaaaagataaaaggtttctaaaacatgacggaggttgagatgaagcttcttcatggagtaaaaaatgtatttaaaagaa

SEQ ID NO: 5993 - DNA, 286 bp, Zea mays
  misc_feature: Incyte ID No: 700382810H1
  unsure 6, 22-23, 27, 51, 75, 86, 105, 107, 144, 150-151, 153, 171, 183-184,: a, t, c, g, or other
accgcncctcatccctgttgtnnccgncggtggcgctcatctcctccccgncggtggcgctcatgcttccccccnccggttctccncatcggcctgctggcttcncnccgtcttccccgacactgatcctgcaccactcatgtntgctgnngntgccggaggaaacccttntttcctctcatnnaacttctggttcatatnctgcataaanttccganatttcgcttgatacngtggaaaataggagttttgtgcaaatattcctaccagtgantcagttgtngcc

SEQ ID NO: 5994 - DNA, 291 bp, Zea mays
  misc_feature: Incyte ID No: 700382812H1
  unsure 8, 22, 27, 35, 38, 203, 268: a, t, c, g, or other
cagcgcgnaggccgcacgatgnctggngttactgnaanagacgtgaaccagcaggagttccgtcagagctctggcagccttcctgcaaaaagtccgggaagctgaaagtccccgaatgggtggataccgtcaagctggccaagcacaaagagcttgctccctacgatgagaactggttctacacgcgagctgcttccacagcncggcacctgtacctccggggtggcgctggggttggctccatgaccaggatctatgggggactcanagaaacggcgtcatgcccagcca

SEQ ID NO: 5995 - DNA, 282 bp, Zea mays
  misc_feature: Incyte ID No: 700382813H1
  unsure 73, 116, 188, 201, 210, 212, 218, 221-223, 230, 233-235, 239-240,: a, t, c, g, or other
gggaaggaaaagtagagaaagaaatgccaattacaggccaaagcgttatttgccaagttttgcttagaatganttttaccaatgtatgagttcttgttaacagaatgtgtaacggnaatactgaaagactttgctaaagtggcattattgacgctgatgtgatgctactgtaatgccataattttttnattgttgcaaaanaaaagtaancncactcngcnnngcactgncannnacanncnnctncnncngcacaaatgcnnaacnangcngngngnngcg

SEQ ID NO: 5996 - DNA, 295 bp, Zea mays
  misc_feature: Incyte ID No: 700382814H1
  unsure 20-21, 76, 124, 194, 236, 246-247, 250, 260, 271, 274, 277, 285: a, t, c, g, or other
gaggatctatggatatctgnnttcctgttggtactaaggaagccaacaggaaattttggactgctacttggattantgctcgagaaaaaagcttttcattcactacactaaaccagttaacttnctttcacaccggtgcacccaagacatggtatgcagtccctagggaccgagcctcagagctagagggagtnttcgtgtacatggatatggagggaaaccctggaccgccttgncatcgctggnnatngcttgggganaggacaacatnggntgncccccaantttctgacac

SEQ ID NO: 5997 - DNA, 282 bp, Zea mays
  misc_feature: Incyte ID No: 700382815H1
  unsure 2, 48, 56, 73, 83, 101, 161, 243, 254, 278-279: a, t, c, g, or other
cnatctgtgcagcagatctgaggtcccgggcgaccgtgaagcagcttncaatcgtnggcatggcgctcgtatngcatagtggngctggaaacaagaatgcntcaaagcacttattgctgcagaatacagtgggatcaaggttgagttgaccaaggattttnagatgggtgtctccaacaagacccctgagtttcttaagatgaaccccctgggaaggttctgttctggagactctgatggccngtttttgaaantatgctatcgcagctagttgctcnntga

SEQ ID NO: 5998 - DNA, 298 bp, Zea mays
  misc_feature: Incyte ID No: 700382817H1
  unsure 127, 282, 295: a, t, c, g, or other
gggaaggacaaggagggcttcaagaccattgagatgacggagaagttctactgccgctcaaaggacatatatgagatcttgatggatgagaacagatggaaagggtttacgcagagcaatgcgaggntcagcagagaggttggaggggaatttagcctcttcgacgggtccatcactggcgtcaacgaggagctgcaggaagggaagctgattgcacaaaagtggcggtttggaagctggcctgacggcttgtactcctcggtccggttggtgtttgatgancccgatctggatnaaa

SEQ ID NO: 5999 - DNA, 292 bp, Zea mays
  misc_feature: Incyte ID No: 700382818H1
  unsure 222, 231: a, t, c, g, or other
atcacaatccgtatagtgcttggatttatgctcattgcattgatctggcaatacgatttctcccccttcatggtccttatcatcgccattctcaacgacggcactatcatgaccatctctaaggacagagttaagccgtctccgttgccggacagctggaagctgaaggagatctttgccacgggcatcgtgcttggaagctacctcgctctgatgactgtnattttctcngggctatgcacaagaccgacttcttctcggacaattcggtgtgaggtcgtcagggacagtg

SEQ ID NO: 6000 - DNA, 300 bp, Zea mays
  misc_feature: Incyte ID No: 700382820H1
  unsure 38, 152, 168, 178, 193, 204, 257, 270, 274, 276-277, 290: a, t, c, g, or other
ggcggcttgtgcagcaatggccaagatcaaggctcganatcttggcgggaagaagaaggaggagctgctgaaacagctggacgacctgaaggtggagctgtcccagctgcgcgtcgccaaagtgaaaggcggtgcggcctccaagctctctnaagatccgagtacgtnccggaaaatnccattgcccgtgttnctccacagttnattaaaccagactccagaaagaaaacctcaggaaattctacaagggcaagaanaacagcccctggnactncnnctaaagaagacantgcgtggccc

SEQ ID NO: 6001 - DNA, 284 bp, Zea mays
  misc_feature: Incyte ID No: 700382825H1
  unsure 20, 22, 148: a, t, c, g, or other
gtccaacagtattagttttntntccaaccagggaattggcgacacaaattcaagatgaagcaatcaagtttggcagatcttcaagaatatcttctacttgcttatatggaggtgctccaaaaggccctcagctaagagagttggagcntggtgctgacattgttgtcgcaactcctgggagattaaatgacattttggaaatgaatagagtgagcctgcaccaagtatcatatcttgtccttgatgaagctgaccgtatgcttgatatgggatttgagccacaa

SEQ ID NO: 6002 - DNA, 285 bp, Zea mays
  misc_feature: Incyte ID No: 700382827H1
  unsure 84, 235: a, t, c, g, or other
agaagaacacacaaaatgagggttcttgtagagaagctgttagtctctgtgtttttagcagcattgctattcagggtgcatggncgtgtctctagaatatgatcacacggcaagcatcgagtgccttggcgacccaatgaaacccttgtacaagggcggcattgtccagaacagcgagttcaccagcggactgatgggctggtcgacacaccggaacgtacaaggccggcgtganagattcgccgtccggcaacaatttgcatggtgcatggggcgggaagctac

SEQ ID NO: 6003 - DNA, 289 bp, Zea mays
  misc_feature: Incyte ID No: 700382829H1
  unsure 182, 185, 188, 192, 194, 203, 226, 228-229, 231-232, 243, 248-250, 254,: a, t, c, g, or other
ggttgtagccatcatcgcgtgctcgtcggatagtagagagaaaattgagatcgcagtcagttgattgaggtcgcaatcgcaccttcgcctaagccaactcaatgcttctgaagatcgtaggcgcgcgccgcacctggctgtatcctcgtgtggcgaagactgtggctgggcgctgagaaccnganatntcgncncggaaagcncatcggggcttgttaagggaacntnngnntcccccggggnggaannncctnancnnnggtagaagccggtgnnaaantcccccctt

SEQ ID NO: 6004 - DNA, 283 bp, Zea mays
  misc_feature: Incyte ID No: 700382832H1
  unsure 92, 204, 245-246, 249, 257, 269, 282: a, t, c, g, or other
ggcttaacaaaggcacacgggaatgttcccgagagatcttcgcataaacttgtgcccgtccgtataggcacgtggccttgtggaagcaggtncatatccagtcatcttggtgttcgtatgatgctgcaatgctgttccgggaaagatttacgtgttgatttgtcggacccacaccacgagtcattcaattgattgttttttgtngctaggtggagactctcagaggctaaccgttcatctgtgcnnttngctgccgnaagagaacagangccatctcctctnt

SEQ ID NO: 6005 - DNA, 296 bp, Zea mays
  misc_feature: Incyte ID No: 700382833H1
  unsure 47, 81, 91, 97, 101, 119, 128, 144-146, 158, 165, 184, 190, 204, 213,: a, t, c, g, or other
cacagaatgttcgtcctccgcaaaaccctcctccatgcgccgccggncgccgccgcggggtccccctctcggatctcttcnctcctccgcntcatcncctntgcatctttttctgaggnaagcggagntggggaagaatggggnnnctcctcacccgnaggcggnggcggcaggggtgggggtngaaacnaatggagctccagntggtctacnggcctcangaangannatttcaacggcncctcgnatnggttcggncgttatnnacctncnnanncagcncnntagtagcnagc

SEQ ID NO: 6006 - DNA, 291 bp, Zea mays
  misc_feature: Incyte ID No: 700382834H1
  unsure 52, 279: a, t, c, g, or other
gatcgtagaaaataggttattcattcgtccttctattatctttgcctttgtnttctttcctaagatttcactacttctgcggggtgtcacagtcttaagatcatggtgtttttatgtctcaaacatggtcgcaattgtgacattaggtagatgggagatttttgactgagttttcgtgttttgtgagcgaatcagggtaggaaatgatgtccgagagtgaagagcaggctcgctcctagacaagatcaacgacaagatcaacgagaagatccatgagtncaagcactcgtc

SEQ ID NO: 6007 - DNA, 284 bp, Zea mays
  misc_feature: Incyte ID No: 700382838H1
  unsure 37, 43, 145, 147, 150, 185, 245, 261-263: a, t, c, g, or other
attagaatctgcaatatccctttgtagtgcgttgganttcctnatgtgcattcatgtccaaagatccaatgctttggattttggcagactccgtttgggttgccccagtctgaagcgcatccagagcagcctcatctcataatangntgngctgctaccatataaaggagggcaattcatgcaanaagccgctgttcagagttgaagaaaaaaacaaggggatgtttggtttctagggactaaanttagtccctacattannnttatttagtcctaaatgctaa

SEQ ID NO: 6008 - DNA, 285 bp, Zea mays
  misc_feature: Incyte ID No: 700382839H1
  unsure 2, 9, 33, 50, 52, 54, 75, 105, 111, 116, 120, 123, 127, 131, 145-146,: a, t, c, g, or other
cngtgttgnttgagcatccatggaaattacgancccgaggaggcgtcctntnanattgaatacaccagctatcgnttccgttgcttgtacgatggttcctgaggntgcaanatggngagntgnattngatnacctgcgtgctgtnntgctgcatggtggtngtggagaggaagatgcagccangccgccgcctgancgccggaaggnctncgtttcgtngtctncaggccgtantccntccnggcccngnnctgcngggctctctcaattccaggagcaagtcgc

SEQ ID NO: 6009 - DNA, 60 bp, Zea mays
  misc_feature: Incyte ID No: 700382840H1
gtcatgaagtggaaaatgccatgcgatgatggctactttctgcagcagcgcctgttgttc

SEQ ID NO: 6010 - DNA, 287 bp, Zea mays
  misc_feature: Incyte ID No: 700382841H1
  unsure 13, 17, 24, 111, 121, 199, 216, 221, 260, 281: a, t, c, g, or other
gaagaagtatgtnttcngcttggnatctgctcaggtgctagctactactggcagctgttggtgtgatagctcatccgttttgctgtgctaccaggaccagcagcaattgtngttgggagtngctggctctgtcatccacggctgttgtcttgcaagtattgcaagagcgtggtgaaagtacgtcgcgtcatggacgtgnccacattttctgtgttnttgtnccaggatttggctgtggtggtccgttgatattaataacnctcatgtccacctaatcttcnaaaagg

SEQ ID NO: 6011 - DNA, 285 bp, Zea mays
  misc_feature: Incyte ID No: 700382843H1
  unsure 33: a, t, c, g, or other
ggccatatttgaaacagttaagaattcatatanaagagtgcatatatatatataatcctgccaagacaaaggtaatggagtcgtcacgcatgttccagccggccatcatcctgcttctcctgctcattgtgaccaccgatgtggcgcaggcggcgagggaatgcgagaaggacagcgagcgattccttggggcatgcatggcgtcggacaactgcgccaacgtgtgccgcggtgaggcttctccggcggcaggtgcagcacttccgccgccgctgcatctgcata

SEQ ID NO: 6012 - DNA, 285 bp, Zea mays
  misc_feature: Incyte ID No: 700382844H1
  unsure 94, 188, 197, 219, 269: a, t, c, g, or other
gggagttgggaatgaaattttgtacagggaagagagagagagggtagttgatgggaagggtttgatgtgactgccctttccttttcgctttgcntcctggatccaactgccgccgccgcatcctgtcttcgttgattcggtgttcttcgatcggatgccttatctgcctagatcggagcaagagcaantccgcggangtgtaaatctgagcaggaggangagaaggaggagaggggatcgagaccggccccgtcttgcttgtgcctgtngcgtacggttctgtaa

SEQ ID NO: 6013 - DNA, 287 bp, Zea mays
  misc_feature: Incyte ID No: 700382845H1
  unsure 8, 69, 138, 167, 241: a, t, c, g, or other
gggttttntgctctccgaccccgagctccgaaagcccgcagcatcaggcgcggcccccctccgcgtgtnaccgagatggcgacgccgaatcaggggaccgttgattaccccagcttcaagctacgtcatacgtcggcnatggtggaactggtaaaactacatttgtnaagaggcatctcactggagagtttgagaagaaatatgaaccaaccattggtgtggaagttcatccgttggattnaccactaatgtggtaagatcaggttctactgctgggataccgcagg

SEQ ID NO: 6014 - DNA, 292 bp, Zea mays
  misc_feature: Incyte ID No: 700382850H1
  unsure 117: a, t, c, g, or other
ccaccaggaacctctcccagcagtgcctgaacgcgcttgctaatgttgtgcctggtcttattggaggcagtgctgatccttgcatcctccaacatgactctgctgaagatgtttggngacttccagaaggatacagctgaagagcgcaatgtccgctttggagtcagagagcacggaatgggcgccatttgcaacggcattgctctgcacagcccagggtttgttccgtactgtgctacattctttgtcctcactggattacatgagaggtgccagaggatctcggccctgt

SEQ ID NO: 6015 - DNA, 291 bp, Zea mays
  misc_feature: Incyte ID No: 700382853H1
  unsure 213, 238: a, t, c, g, or other
gcagaagtgcagcagaacgatcggatctagcagaattctctcaacctcatcggcggcggcgaagagcgtgcggatcggagatggagacaagcgggtggaggaggagagcggcggcgcgggcctcctggagccccgccacggtgtacctgtggctcgcgctcgccgcagcagcactgacgctacgcccaggctaagaaggacctaaacggagtntacccacaaggtctattccgatgtncgagttgacggcaagcccgcaggtcggattgtcatggggctttttgggaagac

SEQ ID NO: 6016 - DNA, 284 bp, Zea mays
  misc_feature: Incyte ID No: 700382855H1
  unsure 265-266: a, t, c, g, or other
gggtaaagcacttggaagctgtgctcatttaactgccttgcggagagactacgataggtgaatactacggtcaatgatgcttggaacttcgatgagcttgaagaacaaatcaccaaggggtatttatgagcatgccagtgagccgagctaggttatatgcggcttgcaaccagtggcatccatgctgccatgtcagtcccaaagctgtcaacgtgggcttcagcgaagagttgcaaatccattcattcatcctcaacctttgtcnntagaggaacacgaagctc

SEQ ID NO: 6017 - DNA, 286 bp, Zea mays
  misc_feature: Incyte ID No: 700382856H1
  unsure 163, 214: a, t, c, g, or other
cgtatggacatggctgttgattgcaaacctaatgaagctcataaccaggtggttgaggttaatgttaaagtggaaagtgcaggcacacataatgtgcataataatgctttctatgctgaagagaagttgctcaaatctgagttgcaagcaatgcgtgattgcnacccttcatctgcccgccactggattgtacgcaacacacgaactgtgaatncggacggggcagccaatggctacaggctactacctggtttcgaactgcctgccttggctctgcctgaggcga

SEQ ID NO: 6018 - DNA, 279 bp, Zea mays
  misc_feature: Incyte ID No: 700382858H1
ggaggcaggaggacatggaaaagcagctgagtactgtggttcctgcatccatcgcaaaggagggcaaaagacttgagacatcattagggcgcactgtagagaaatcgatcaaagctaatattgatgcattttgggctcgtctccaggaggacaacactaagcgtgaaaaggctgatagagatcgaatgcagcaatttgttactctcattacaagctacaataaataaggattaccttctaatctggagaatcacttaagaagaatttctcattgggccg

SEQ ID NO: 6019 - DNA, 280 bp, Zea mays
  misc_feature: Incyte ID No: 700382861H1
  unsure 279: a, t, c, g, or other
gctggagtactacccgccgccaccgccgccaccgccgctgggccacgccgatgtgtaccatgacgtgatcctcccgccgccgtcgcaggcacggttcggcttcgagatcaaggaggtgggcatgaccagccgctacgctcccgctgaggatctgcaccagatggacagcgaccaggaagagggtgctgagggtggcgatgacggtgacagcagttgcccacacgccattcgactgcaggcggaggattcatcaccaatttatgagcattcaattcaganc

SEQ ID NO: 6020 - DNA, 284 bp, Zea mays
  misc_feature: Incyte ID No: 700382862H1
  unsure 230, 274: a, t, c, g, or other
ggctttgttgcattgcatcacaagttcacagctcgcccggacccagagggagcttgtacttccaaagttccacagttccactgcacagatcgtcggcggcggcgcaggcaaggccacaatgtctccggcgcccagcagcggcaagcgcgggagggttcccgacccggaggaggacgtctacgtcgacaacctccactcccacaagcgctacctcaccgagataatggctnccagcatgaatggcttgtccgttggagattcattcctgacaatntccatggggt

SEQ ID NO: 6021 - DNA, 282 bp, Zea mays
  misc_feature: Incyte ID No: 700382863H1
  unsure 26, 31, 39, 183, 190, 195, 218, 221, 224-225, 240, 247-248, 251,: a, t, c, g, or other
ggggaagatccggaagctgcgatgtncgaancggctgcngtcgcggctgctcggcatgttccaatcgcggacgcaggtgggcgtcgacaaggccggcaaccgctacttcacccgcgttgaggaggtcgacggcacaatgaaggagaggcgctgggtggagttcaagggcgcagaccaggactngaccacngttcnaggttaccttcctccccttccgntcnttnncccataggtttttanaatgtcnntgnaaaaagannnccccncattnanccccncncc

SEQ ID NO: 6022 - DNA, 284 bp, Zea mays
  misc_feature: Incyte ID No: 700382866H1
  unsure 151, 187, 248, 271, 275, 279, 282: a, t, c, g, or other
aacaaagctcgttgttgaagatatttgccgggatatctaccgtttcagatcctgaatggaagatcattttacttaggtacttcaatccagttggtgctcatcctagtggatatcttggcgaggacccacgaggaattcccaacaatcttangccctatgttcagcaagttgcggttggtaggaggcnagctctaaacagttttaggaatgactatgcaacaagactgggatggggtccgagattacanccagtggttgacttgctgacggncatntgcngcnag

SEQ ID NO: 6023 - DNA, 285 bp, Zea mays
  misc_feature: Incyte ID No: 700382867H1
  unsure 27, 66, 106, 191, 207, 212, 223, 229, 235, 247, 260, 269, 279-281, 283: a, t, c, g, or other
catcaatcatgtctggtcgttcgtggncaataatggcgcctctcctcagcgtcgatgctgctcgtngggctacgccgcgggcttccgaggaggaggaggacggcgncggcaaaaagaagccccacgtcaaccacggcaagtttaaggcggacgtgggacggacgggcacgcgacgtactaggccgggcgcnacgggttaatgacacnagganaacgaccttgnggatanaagggnagtgggaaaaanctagggcaccctncaggaggcngtaggcccgnnntnta

SEQ ID NO: 6024 - DNA, 280 bp, Zea mays
  misc_feature: Incyte ID No: 700382868H1
  unsure 38, 43, 67, 155, 217-218, 230-231, 236-238, 240-241, 244, 249, 255, 263,: a, t, c, g, or other
gcaggtcctggtgcttgatggtcgaggccatctcctgngccgnctggcggacatcgtggctaaacangtactgctgggccggaaggtggtggtctacgctgtgaaggcatcaacatttctggcaatttctacagaaacaagttgaagtacctggntttcctccgcaagcggatgaacaccaacccttcccgaggcccctaccattcgggcccccagnngcatcttctggnnggacnnnannagntatgngcccanaaaaacangagaaacngacnntctg

SEQ ID NO: 6025 - DNA, 285 bp, Zea mays
  misc_feature: Incyte ID No: 700382870H1
  unsure 233, 251, 255, 273, 278, 282: a, t, c, g, or other
gcaaggatacagaaggcttatagatagttctttaagctactttaagggtccagctgaagcgtctgttgatgcggtccatttggtcttaaaagagcttgttcggagatcgattgcagcaacagaggaattgaagcgatttccaacacttcaatcggatatagcagctgctgcaaacgaaagcctggaaagattccgcgaggttggacggaagactgttcttcgtctagtagagnggaagccagctaacctancgtngcatttttccgcaagctncctantgancca

SEQ ID NO: 6026 - DNA, 282 bp, Zea mays
  misc_feature: Incyte ID No: 700382873H1
  unsure 279: a, t, c, g, or other
tccatatctccggaatggacaccctggcacgtggcctccgcaacgttgccaagctgattgaggatggttccctacgatgatcttgtccgcaagcggtaccagagctttgatagtgatatcggtgacttgatcgaggctgggaaaggagactttgagacgctagaaaagaaggttctagagtggggtgagcccactgttgcatccggcaagcaggaatggcggagatctgttccatctgccctatagatggtgccagtccataggtccaggattagcaanggt

SEQ ID NO: 6027 - DNA, 275 bp, Zea mays
  misc_feature: Incyte ID No: 700382874H1
  unsure 36, 56: a, t, c, g, or other
gcaaaaaatctgttacagtccacttaggtggaagangtagtttgtagatgattttnttttaatatatgaactgtaatagtaaggttacaataaattttcacataggtgatcaaacttctgtttgtgtaaagccaacagatggtctgacctgacatgtgtttttccaggagtcactacttatagaaaaagctgttcctagaggtggtttctcccggcaatgcagaatctgaagcacgtctaaatggcttgatgatattctaaattcaatccctgtc

SEQ ID NO: 6028 - DNA, 282 bp, Zea mays
  misc_feature: Incyte ID No: 700382879H1
  unsure 5, 19, 29, 34, 42, 45, 194, 201, 209, 211, 214, 224-225, 236, 244, 247,: a, t, c, g, or other
gttantggcattctagatnagagcattgngaggnaaagaggnganataccacatcgtgttgtttacttgctaaggaatgttgttcaagagattgagcaccgcattgctatccaagcggatcacataagaaatcaaaatagcatcatcaagacccgggaagacaagtaccgttcaaaattaaagcactcgagacntagtaanatggcacnantgnagcaacatgnnatgcacgtgcnccggctgngcnactggaggtanaacncnantangngnatcangacc

SEQ ID NO: 6029 - DNA, 285 bp, Zea mays
  misc_feature: Incyte ID No: 700382881H1
  unsure 32, 62, 69, 94, 96, 102, 181, 213, 279: a, t, c, g, or other
ctctctcttgctcgcactcgcggagatcgaanagaagcgcagaaggccccagcactagcgcngccccgncgccgcatcagacatggcgctggcngntacgcntcgtctcgcgctcccgtcagctatattcggttcaagccactttggggaatggaggtgtcactcaagttcgctctttgcnaaggatgcagctccagctgaccgtcctctgtnatggggatgatctctgaagggatattctttgaggtaaagaagaatttgagacagctcttggtgttnaaaaaa

SEQ ID NO: 6030 - DNA, 286 bp, Zea mays
  misc_feature: Incyte ID No: 700382882H1
  unsure 281: a, t, c, g, or other
gcattctcttcccttcccttccctgagcaaagagaagtagccacaagcatgtctggcatcatcgacaagatccaggagacgctccacatcgggggcgaccacaaggaggagcacgagcacaagaagggcgaggagcaccacaagaagggcgaggagcaccacaagaaggacgacggggagcacaaggagggcatcgtggagaagatcaaggacaagatcaccggcgagcacggcgacaagtccggcgaccacaaggacaaagaccttaggagaagaaagtnagaga

SEQ ID NO: 6031 - DNA, 281 bp, Zea mays
  misc_feature: Incyte ID No: 700382883H1
  unsure 4, 116, 161, 199, 205, 209, 218, 223, 227, 260, 263, 274: a, t, c, g, or other
ggcncgaggtgcagatcatgtaccacctgtccggccagccgggcgtggtggagctcaagggcgcgtacgaggacaagggctccgtgcacctcgtcatggagctctgcgccggcggnagctcttcgaccgcatcatcgccaggggccactacaccgagcgcnccgcggcgtcgctgctccgcaccatcgtcgagatcgtncacacntgcnactccatgngcctnatcnaccgcgactcaagcccgagaattcctcctcctnagnaggacgaggangcgcttt

SEQ ID NO: 6032 - DNA, 284 bp, Zea mays
  misc_feature: Incyte ID No: 700382884H1
  unsure 207-208, 215, 217, 227, 238, 242, 252, 267, 272: a, t, c, g, or other
gggggaagaacgctacagcgatcccaaactggaaggttgatccgaggtgccctaacgcgtccaatccgttccacatgtgcgcccagtactgcttcgaccatctgagtgaaacagcgcagacaagtgcagcaaagtcagacaagagacgaggcaagggcgtttctgaagacgagggaagaggagaaaccaaaaccaacctggttgcgnnaacgctncnaacccctacnacaatgcggtncacnaatgcaaganaaaggcggtggtganaggtngaccttaaagaa

SEQ ID NO: 6033 - DNA, 260 bp, Zea mays
  misc_feature: Incyte ID No: 700382887H1
  unsure 53, 173, 234, 255: a, t, c, g, or other
tcctctctgttcatagcctcccaagaaacaagagccaaccagcgcttgcgaantccaagcgccgcagcaatgtctctggccccgtccatcccttccatcaaggtgaaggtgggggccgtctcggtcgctcctccacaccgtgcatgccggtcttcgcggtgatcaggagctcnaaggcagagggccccatccggagacctgcggcgctccgctgttcgccaccgccaccgatgncacccaagacgccggctctgnccaat

SEQ ID NO: 6034 - DNA, 278 bp, Zea mays
  misc_feature: Incyte ID No: 700382890H1
  unsure 230: a, t, c, g, or other
aaagaaacaagcgcacaagatcaaatacctcgccgccaataatggcctccaggtcctccatcctgctcgccatggtgatgctggctgcgctattcgccgttggtttgtgcaccacccccctcaccttccaggtcggcaagggatccaagcctggccacctgatcctcacccccaatgttgccaccatatccgacgtggagatcaaagagcacggtggcgatgacttctcnttacgctcaaggagggcccgactggcactggacgctcgacaccaaggc

SEQ ID NO: 6035 - DNA, 280 bp, Zea mays
  misc_feature: Incyte ID No: 700382895H1
  unsure 167, 191-192, 215, 221, 225, 227, 229, 234, 238, 240, 243, 245, 249,: a, t, c, g, or other
gcaagttactgtggaagcaattcaaatcagaaactgagttcaccattacacaagcagtatccacacagcaagctccacaggcgtggtaatagtaagctgcctcctccttgggcaattgtggccattgctattcttggtttcaatgagatcatgacgcttcttaggantcccatttatgtgtttttgctatnnggtgggctacttgatggtcaagnttaagnaatncnantaganatangnagnanagcnaaanggaagtggtnngngnacaanncccanc

SEQ ID NO: 6036 - DNA, 284 bp, Zea mays
  misc_feature: Incyte ID No: 700382896H1
  unsure 120, 197, 251, 256, 263, 278, 280, 282: a, t, c, g, or other
tgttgatttggttcttaatttcaagtgtgctgacggctgtttcatgaagaagcaatcgaggggcaacatctgcgcccactgtggacagctctttgacgtcagcaattcagcttctacganctgtagccccagcctcgggagttatacatggcattctcaggtagaacctgctggtgttttaggcctcgaagcctcanagatggagaggatgcgcacatatgctgagcagaccaagcagctggaagattacnacaanaagcagnaaaaattgtgccccncncncc

SEQ ID NO: 6037 - DNA, 290 bp, Zea mays
  misc_feature: Incyte ID No: 700382901H1
  unsure 100, 150-151, 168, 178, 180, 211, 253, 259, 267, 278, 284, 289: a, t, c, g, or other
gtggtggaagcagcaggggaagaaggcaaaggaggggagaagatgtagttcacccacttaaagtttctctggaagatctttacaatggcacctcaaagangctctctctttcgcgcatgtcatctgctccaagtgcagggcagggtcganntctggtgcctcatgagntgcctggttncnaggctcaggctgaagtcactattcgtcactnggcccttcctgatacagcaatgcagcagccttgcatgatgcngggganggtgagancttcatgagangtccgngtccng

SEQ ID NO: 6038 - DNA, 300 bp, Zea mays
  misc_feature: Incyte ID No: 700382902H1
  unsure 59, 68, 78, 214: a, t, c, g, or other
aagattgatgtgtaccagaatgcgcgtgcatgcattaggttgcgtgtggcatgtgaganacttaaganggtactgagncgccaacccagaggccccactgaacattgagtgtttgatggatgagaaggatgtgcggggttttattaaaagggaggagttcgaacagatcagtgcctcggtgctggaacgcgtgaaaggaccactggaaaaggcntggctgaagctgggttgactactgaaatgtgcactttgttgaggttgttggatctggttctcgtgttccggctatatcaagttatt

SEQ ID NO: 6039 - DNA, 299 bp, Zea mays
  misc_feature: Incyte ID No: 700382903H1
  unsure 186, 198, 226, 228-229, 265, 273, 278, 292: a, t, c, g, or other
ccatccttcacatacaagacaagcctgctctgttcagaagcttcttcaaatggctaaagcccggcggcaaagtcctaatcagcgactactgtaagaatcctggaaaaccatcagaagaatttgctgcgtacattaagcagagaggctatgaccttcacgacgtgaaggcttatggacagatgctgnaggatgctggtnttcataatgtcatcgcggaagatcgcangnngcattcttgaatgttctacagagggagataggtganttgaaagnacaangacgcttcctggcnattcacc

SEQ ID NO: 6040 - DNA, 300 bp, Zea mays
  misc_feature: Incyte ID No: 700382904H1
  unsure 73, 78, 154: a, t, c, g, or other
atagacttgaagggcagaatgccactgcatgataacatcagtgttgataacttgttatcagcatatcccacgnaaganaatggctacgtaggccagtataacactatgaatgggagagctccagcagatgaagctcacgcacgctggcctttangaacatatagtaatcagaattatgtccatggccctcttgctgatgagttctttgaacacagggcatgataccatggggttgcatattcccaggcagcagcagctgatggttcccagcacctcgccagttgatgaaatatggtattt

SEQ ID NO: 6041 - DNA, 300 bp, Zea mays
  misc_feature: Incyte ID No: 700382905H1
  unsure 93, 196-197, 209, 222, 252, 259, 268, 272, 285, 293, 296-297, 300: a, t, c, g, or other
atgtggcagaattgtccgcaagagaaatctggccaggttgccaggaataggctttttgtactctgagcttgtacaaggcatcccacccatacntcctcacttgatagaaagggtacttccatccattcagttctcgtgattatctcaataaagtacttaccgatcagcagtatagaaacaagcgagaggttccccnnccggtatgtganagccaagagattncaggctatccgatgtgtggtgcgctatggntacaatnataagtggnagcnccaaagagatttnagggttanttnntgn

SEQ ID NO: 6042 - DNA, 300 bp, Zea mays
  misc_feature: Incyte ID No: 700382907H1
  unsure 135, 221, 223, 229, 243, 255-256, 290, 297: a, t, c, g, or other
gtgatttgaaataattgggaataaatagttcgtgaatccctgaagcgtgcatatatatattcctgccaagataaaggtaatggagtcgtcacgcaggttccagccggccgtcatcctgcttctcctgctacattntgtccaccgatatggcacaggcaagggaatgcgagaagtacagtgagcgatttgttggggcatgcatgatcgcagacaactgcgcnantgtgtncccgcggtgagggntcttggccggcnngtgcagcaccttccgccgccgctgcatctgcacnaggcatncta

SEQ ID NO: 6043 - DNA, 298 bp, Zea mays
  misc_feature: Incyte ID No: 700382910H1
  unsure 103, 132, 221-222, 229, 232, 235, 244, 258, 266-267, 297: a, t, c, g, or other
gaaacagttaagaattcatatataagagtgcatatatatatataatcctgccaagacaaaggtaatggagtcgtcacgcatgttccagccggccatcatcctncttctacctgctcattgtgaccaccgatntggcgcaggcggcgagggaatgcgagaaggacagcgagcgattccttggggcatgcatggcgtcggacaactgcgccaagtgtgccgcnntgagcgntcnccngcggcagtncagcaccttccgcngccgctgnntctgccataagccgtgctacttaactcatnc

SEQ ID NO: 6044 - DNA, 289 bp, Zea mays
  misc_feature: Incyte ID No: 700382913H1
  unsure 3-4, 23, 78, 91, 110, 156, 166, 168, 175, 231, 239, 243, 277, 280, 282: a, t, c, g, or other
aannatcacaatgagagtgggantgccaatctttacagcctgcactcttggattgggataggaacaattactttgtanggtattcagtggntaattggattcgtcacgtncttcttccctggtgctgcgccaaacgtgaagaagggtgttccttcntggcacgtantnctttggncccttggtctacatcttagcactggctaatgcagaactcggctttcttgagaagcncatttccncganagctcaggtctcgacaaatatggcacagaggccntcntnatgaatt

SEQ ID NO: 6045 - DNA, 290 bp, Zea mays
  misc_feature: Incyte ID No: 700382914H1
  unsure 13, 69, 71, 77, 121, 175, 189, 267, 282: a, t, c, g, or other
ctccggcaaaaangttgttgaagcaaccgtttttcaagcaagctcgttccactgatttcattgcacganancttttngaaggattacctggccttggttttagatatcaagctttaaaggnaaaggatcaagatttaatggctcaaaagaaaatgtccgatggaaagaaagaagnaaatctcgcaggangaatgacaaaaggggtatcaggcagctggaatttgacatagatgactgagatcccaagcttcatgggcacaaatgtgnagaacatatatctgnaaagatca

SEQ ID NO: 6046 - DNA, 299 bp, Zea mays
  misc_feature: Incyte ID No: 700382915H1
  unsure 34, 162, 181, 199, 253, 291, 297: a, t, c, g, or other
ctcgtggtcgttgcttcctggcggcggcgcgcantcttcgtcgggccattcaccggcgacgagcattcatctggaggagagcatcacactcatctaactgatattaggatgagtctatgtacaatagcacgccgactatgtctttcaaaaccatcctctgtnaatcgtctttcagtaattngggctcatctatacagcnccgaggctgcaaaggacacgggtgctaagcagtacaagtaccctgatgtatacnacccatacgggctatgtcgctacgtcagagaaattgtngatctngc

SEQ ID NO: 6047 - DNA, 93 bp, Zea mays
  misc_feature: Incyte ID No: 700382917H1
  unsure 17, 22, 37, 39, 42, 56-57, 69, 71, 75, 80: a, t, c, g, or other
cttggcgatatcgtccntgccnacgctcgtctcctcnanggngatgctctcaaggnngcaccagttctncncttnactgnagaatccctcccg

SEQ ID NO: 6048 - DNA, 300 bp, Zea mays
  misc_feature: Incyte ID No: 700382918H1
  unsure 55, 59, 75, 144, 182, 190, 195, 200, 202, 205, 211, 258, 261, 266,: a, t, c, g, or other
ccttttttagctttcatcagtgctacactcccacagtccccacatagcacgcagntgtntgaaaatatccaatanaatcaacaacactgcaaatttactaggctcaactacaagaggcatggagttattattaaaaaatgaagnactcatgatgattcccaaacaaagatactgacctatantcaacatnctatnaattntngtngctcantcctatagtctactgagctactgattaaaatgttcaagcatgaaccnttngcatnccggtgctcagatgaggttgatctaagactanng

SEQ ID NO: 6049 - DNA, 191 bp, Zea mays
  misc_feature: Incyte ID No: 700382919H1
  unsure 78, 164: a, t, c, g, or other
aataaaagtgccaagaaacaggcgttcgtcgccggagggaaaaactactgctcatcttctttgcatctgtgagtgttnttgggtgaaggccggttccaacagtagaggcgtgtctccacgagcccgttctccctgacaatctccgcccacaccgcctcttcccngccatggcctccgacacttgaatgctt

SEQ ID NO: 6050 - DNA, 296 bp, Zea mays
  misc_feature: Incyte ID No: 700382923H1
  unsure 13, 34, 147, 150, 169, 175, 202, 209, 218, 230, 251, 261, 293, 295: a, t, c, g, or other
gtgagtgccggtnatccatccggagttggatttntcctcggcaaggaggttttgcaccatacaagattcgtacaaaattgccgaaatgggaggtataattagtggggactcgcctaggcacagctcaccagcatcgaagttagagancangatggttgaacgctatgcnacagcngggcattaaaaggaacctctgtgaaancatccantagtgtcancatgaatttccnaaaatcgacgaaatttgagcnaacgcagganatcttccagatttgatgaacttccatggtgantnc

SEQ ID NO: 6051 - DNA, 299 bp, Zea mays
  misc_feature: Incyte ID No: 700382924H1
  unsure 182, 198, 225, 248, 261, 271: a, t, c, g, or other
gaccaacaagcaggattaccattttcttaagcctaacatggcagaagatgcagctgagaaccttttgttttcaaagacaactactgcaaaggtgtggttaattggggatggtctagatgcttctgagcagtttaaggcacagaaagggacacagtttatcccatattcacagtttccaccangaatggcacgcaaggncacctgcacctcactcgacaactcccngcatggttgtacctaaaacactnacagatgtgccanaccgtgagantggctgcccaggagggtctgatgctggc

SEQ ID NO: 6052 - DNA, 187 bp, Zea mays
  misc_feature: Incyte ID No: 700382927H1
  unsure 9, 37, 49, 63-65, 68, 85, 135, 176, 186: a, t, c, g, or other
cactgatanatgtctatatcgcgttggctgttggaanctccttctgcgncctcctaagagcgnnnttncttgtaaacagcctcanataaagacagcgactctattattcgacaagatgcacatgtccatattcanagccgctatgtctttctttgattccactccgagtggacgcntcctgaacana

SEQ ID NO: 6053 - DNA, 281 bp, Zea mays
  misc_feature: Incyte ID No: 700382929H1
  unsure 51, 77, 180, 196, 255: a, t, c, g, or other
ggctctagtcctctcgcatccgcagcttccccagccagctagggtttgcanatgacgaccgcggcgcgccccacctnggcgccggccaagggcggcaacgagcaggggggcacccgcatcttcggcccctcccagaagttctcctcccgcgactcgccgcgcacacctccctcaagccangaaaaaacggtcaaanagacccaagaggagttacagaagaggaatttcagggaggaattgaggaactgagcgcancactactcttccaggataatcctatg

SEQ ID NO: 6054 - DNA, 279 bp, Zea mays
  misc_feature: Incyte ID No: 700382930H1
  unsure 34, 36-37, 40, 44, 154, 164, 198, 238, 242, 265, 270, 273: a, t, c, g, or other
ctttcaacgtataaaatagcagaacaagattttncnnatntctnccctgatgatccacccacatttatcttcagtcctgctaacagacgaagagggagacctcacaaacgactacatcttagtcaagaggacaatgttgctaataaacagactnttgcaagttntaggagcaaagctactaaagaccgcgatacactntgaaacaagcagaatgagtcatggcttttgaaaggctaantcanaagagaaaagcagctgcctagangcganganaaaaga

SEQ ID NO: 6055 - DNA, 191 bp, Zea mays
  misc_feature: Incyte ID No: 700382931H1
  unsure 63, 139, 152, 165, 170: a, t, c, g, or other
atctcttctccattcgtttacctgaagcacaagaataaacgcagccgggcatgggcgaagtangctcaacaacgtgaccgtcctgctggtggccctcctcctcctgagcagtggcgttcaggacgctgccgccatgccnggcagttgaatangacgcgattgtcnccganagccacagggcaaagaacggg

SEQ ID NO: 6056 - DNA, 195 bp, Zea mays
  misc_feature: Incyte ID No: 700382932H1
  unsure 122-123, 192: a, t, c, g, or other
tggcattttgtttacagagtcagcgttgaagggctcccacttcattgaattgtgcgctcagcggcatattcctttgattttccttcaaaacattactgggttcatggtcggatcaaagtctnnagctagtggaattgccaaagctggagcaaagatggtcatggcagtttccgtgctaaggttcctaaaatnaca

SEQ ID NO: 6057 - DNA, 300 bp, Zea mays
  misc_feature: Incyte ID No: 700382933H1
  unsure 160, 201, 219, 226, 267: a, t, c, g, or other
gtgactcggatgaatttaacagatgggaagctggccaagttttggcacgtaagttgatgctcagtctcgtagctgatttccagcaacagaaaacactggttctaaatccgaaatttgttgatgggattagatcaattctgcgcaacacaagcttggatanggaattcatgcgaaagcaataactttgcctggtcaaggggngattatggatatgatggnagttgcngatcctgatgcagttccagctgtccgtaactttattaaganggagcttgccgtgcaacttaaagatgatcttct

SEQ ID NO: 6058 - DNA, 296 bp, Zea mays
  misc_feature: Incyte ID No: 700382935H1
  unsure 50, 120, 151, 153, 172-173, 175, 211, 213, 223, 251, 255, 270, 283, 287: a, t, c, g, or other
tcagataatgcttgatcatagcactgggcgttctagagggtttggttttntcacatttgaaagtgaagattctgttgaaagggtcatatcagaggggagaatgcgtgatcttggtgggangcaggttgaaataaagaaggctgaaccaacnanactggatctgaccacagcnntnatgggagatcaaaccacggaggtggagctaaccgcnantcttaccgtntggtggtggactggtagtggccacagtngagnccgccatagttatgngtatgtaatgctnatcnatctgcccc

SEQ ID NO: 6059 - DNA, 306 bp, Zea mays
  misc_feature: Incyte ID No: 700382937H1
  unsure 80, 97, 166, 170, 184, 188, 195, 226, 242, 260, 264, 266-267, 277, 280: a, t, c, g, or other
cgcaactgctgtgccgagatttatctttatggaggtcaagtaacatcatggaagaatgacaatggggaagacttgctttncctcagcagcaaggctnttttcaaacctccaaaagctattcgtggtggtataccaatctgctttccccaatttggatcacatgganatcntgaaccagcatggnttcngctaggnaacggttttgggactattgacaacaatccancctctttaccattaanccctgcctattaaagctntgtngnnctgattcctnaanccttctgaagaggatttaaagctccg

SEQ ID NO: 6060 - DNA, 295 bp, Zea mays
  misc_feature: Incyte ID No: 700382940H1
  unsure 30, 40, 80, 111, 131, 136, 148, 155, 157, 167, 185-186, 193, 202, 207,: a, t, c, g, or other
cagagacgtggtctttttataaaacttgtnaatctttgcnttttgaagaatttaacatggaccttttcgagaggctcctnctgtgttcataatttgccaaaaaattacaanagccgtgatttttaacatcnctgtnatgctgatttcnctttaantnggtcctattngcatagcgagagagtggnnaactgantgctatgcnccaangngcattctggagggttncacagatncaaagacngnacnangacatntcngtgnnacnggacaacncatcagcaccanctgcctcnna

SEQ ID NO: 6061 - DNA, 296 bp, Zea mays
  misc_feature: Incyte ID No: 700382942H1
  unsure 30, 92, 96, 112, 151, 178, 191, 208, 210, 212, 215, 221, 234-236, 243,: a, t, c, g, or other
cgaccaaggtcatatccccttaccccagcntaagccgcggtggtgcacatgcatcccatggcggtgcgcgccggtgaagcaggcgaactgcncacnccggtgcccgattttnaacgaggatgggtcctacgcatggaggcgacctaagtgnaatgtagcagaggtcctattaccacgnattacaaagatanttcttcccatggtgtgntncngtncattgntgggtttaacttnnngcgaacnattcttggtgactcnaagggcttcanacacggagccagnaacgaacgtgacac

SEQ ID NO: 6062 - DNA, 198 bp, Zea mays
  misc_feature: Incyte ID No: 700382945H1
  unsure 18, 25, 29, 49, 65, 67, 78-79, 83, 115, 129, 138, 141, 148, 153, 165,: a, t, c, g, or other
cggtccccttcgacacgncggccgnaganttcccggtcctccgtcggcnactggtacaccaaggntnacaccgtcctnnccangaacctggacgccggcaaggggatcgggcggnccgcggggctcgtnatcaacggnaanaacgagnaggcncgcgtcgaaccngccccatgtaanaacntgnaggnccggtacncc

SEQ ID NO: 6063 - DNA, 292 bp, Zea mays
  misc_feature: Incyte ID No: 700382950H1
  unsure 148, 164, 171, 188-189, 216, 223, 252, 284: a, t, c, g, or other
gtatggtcaaagatctccggacgaactatgaagtatctgacccggattcagttctagaaggagatctagacgatttcatcttgaactatttgtcttcgtcactggatgaagctgatgtaagtacctgaacaaagaaccatgctcgccnttttcatgagctaccncccaatncactggcttgaaacaannccaactgagacatgctgaagcgctacnagctggnagtgctgcctccagtcttttctttggtanccataccagtcgaggtccaatgatgagatttnaggtaggg

SEQ ID NO: 6064 - DNA, 188 bp, Zea mays
  misc_feature: Incyte ID No: 700382951H1
  unsure 2, 17, 19, 67, 74, 79, 90, 99, 110, 112, 121, 133-135, 137, 150, 157,: a, t, c, g, or other
tngcgaagtcgtcgtcntncggttcggagcggatctgaggcgacgatagatagaggcggcgggatcnctcggtntgcantcctgctccanctcgatagntgatgtctctncnctgataatnattggatccaannncnatattattagtanatctatnagatatgccgcctggaagaggcgaggtcanc

SEQ ID NO: 6065 - DNA, 307 bp, Zea mays
  misc_feature: Incyte ID No: 700382952H1
  unsure 44, 110, 138, 157, 198, 203, 231, 257, 259, 271, 295, 298, 300, 302: a, t, c, g, or other
ctcctctccctctccctctccgatccattctccagcgcaggcangtaaacatgtctgaccgggcaaagatgtcgtggcaggcgtacgtggacgagcacctgatgtgcganattcgagggccaccacctcgcggcggcngccatacgtcggccacgangtgccgcctgggcgcaagagcacggcattcccccgagttcnaaganccgagggacatggccaacatcatgaaangacttcgacgagccagggcacttcgngncgaacaggcttnttcctcggacctaccaagtacatngtncncncaggc

SEQ ID NO: 6066 - DNA, 300 bp, Zea mays
  misc_feature: Incyte ID No: 700382953H1
  unsure 65-66, 170, 192, 210, 223, 229-231, 247, 256, 262, 272: a, t, c, g, or other
ccatcctcgagattggagcactcctaagtccaattacatgttcagccatctatagccttccactnngtccgggtgctcagccttgtgcgtactatgcccaaaatggatattgcagatatggagttgcatgcaaatatgattcactcaatgggtacactaggctacagttncatctgctttgccacttatctnacatgcccattgctcccnatcctattagctnctccgnnnccacttggctccatcntcgtctgcncccagnatatatttcnaacaaaagatccatctatcaatcatgta

SEQ ID NO: 6067 - DNA, 286 bp, Zea mays
  misc_feature: Incyte ID No: 700382955H1
  unsure 2, 11-12, 31, 46-47, 95, 99, 105, 145, 180, 186, 188, 197, 219, 247,: a, t, c, g, or other
gngccttctgnnatcggtgatccataaggcntcgtcggagggctannctgtccgagtcgtgcctcaaaccgttgccaccggagccgaagaagganagcnaggtcnacgacgccgcggtgcggaagttcaaggagaaggccttttnatcataaaggatacttcttgaccggcgactcatcnaggtcntnagctggttngcgcagagaataactcatgttntaccctccttcatgccatcttcgtgcanaanctngtggaagccacctggaccggaanaccgcaaaag

SEQ ID NO: 6068 - DNA, 292 bp, Zea mays
  misc_feature: Incyte ID No: 700382956H1
  unsure 40, 108, 183, 198, 208, 212, 217, 232, 242, 291: a, t, c, g, or other
cgccgccgcctcagccctcgccccgcgctgctgtactctntcacctccttcgccgttgtctaccagattcatcccatggcgtcggagaagaagcagtcgaacccgatncgggagatgaaggtccagaagctcgtgctcaacatctccgtcggcgagagcggtgatcgcctcacccgcgccgcnaaggtactggagcancaaagcggcncatnaccgntattctccaaggcangtacactgtnaggtcgtttaggtccggcgcatgagaagtcgctgctatgtgacggtgcng

SEQ ID NO: 6069 - DNA, 294 bp, Zea mays
  misc_feature: Incyte ID No: 700382959H1
  unsure 142, 149, 185, 190, 192, 204, 211, 227, 230, 236, 273, 279: a, t, c, g, or other
gaagaggaacagcgatccagcgttcactggggaggttgtcgagctcgatttcgacgagctggatatggagaccctctgggagctcgatcggttcgtggtcaattggaggaaggctctgaagaagagccagcggaactctatngtgaatngcgatgctgccgcggcggtgaatggagacgccatcnatgtnanagttgttccggnaccagangactggtcgaggttanctntacatncctcctggcggttcgagatcggagatcggctgacttncagagnaagaatggaggccga

SEQ ID NO: 6070 - DNA, 300 bp, Zea mays
  misc_feature: Incyte ID No: 700382961H1
  unsure 11, 81, 114, 165, 182, 195, 202, 205, 211, 221: a, t, c, g, or other
cgacgtctgcnttctgcgcctccatttcggcctctgtcccttgcaagttcaatctcacctaccaaccatgggtaaagagangtcccacatcaacattgtggttattggccatgncgagtctggcaagtccgaccaccacaggacaccttatctacaagcttggangcattgacaagcgtgtnatcgagaggttcnagaaggnagnctgctnaaatgaacangcggtcttcaatacgcgtgggtgctcgacaagctcaaggctgagcgtgagagaggtatcaccattgatatcgctctgtg

SEQ ID NO: 6071 - DNA, 297 bp, Zea mays
  misc_feature: Incyte ID No: 700382962H1
  unsure 5, 39, 59, 142, 160, 188, 190, 198, 204, 225, 259, 261, 268, 273, 278,: a, t, c, g, or other
cgggngatcacttcgtcgcggcgaggagggagggggtcnccgttagcgcgcggcacttngatgagaagggcagcggtggaggaggatgcggaaggcgtacagggactccatcaaggtgctcgaagctgacatccagcacgcnaacaccctggcctccgantttccccgagactatgatggtgcgtgcntncagatgcngctgtngtacagtacccgcagctcatntattcctcttcctggtgcatggacggatgcagcnangcagggntcttngtctnctgcnatcctcatatacca

SEQ ID NO: 6072 - DNA, 299 bp, Zea mays
  misc_feature: Incyte ID No: 700382963H1
  unsure 136, 144, 182, 187, 214-215, 221, 234, 257, 262, 266-267, 270, 283-284,: a, t, c, g, or other
tctaacgcacactgccgcgccgccctacggtctcccctactcctctcccttccttcctcttccacggacacgggaggagaagggttgatcacgaccggggaggacgcgtggccagagatgggtctccacggaggcntcgtcgtnctccgcgcggccgtgctacgccgccgtcctcggcttcntcgcngctgccgggttcatcttcaaacgacgnnctgctngagcgcgggcagnacacaaccggccggagcctgtgnaggcncaannaanttccccggtaacnnaaaggncacnatnaa

SEQ ID NO: 6073 - DNA, 300 bp, Zea mays
  misc_feature: Incyte ID No: 700382964H1
  unsure 15, 24, 44, 62, 68, 72-73, 84, 135, 191, 257, 300: a, t, c, g, or other
ccaagatcctgcgcnactacctcnagtccgaagctatggcgatngttccgcacggcgcccgngggganttcnntctccatgtcntacccggtgctgtcgccggcgagctacacggcgtgggcgatcaaggtggantcgatcctcgacgcgcaaggtctctgggaggccgtgtctaccaccagatggtggcnaggtgaacgcggtgaagaacaagacggcgcgggcacaattctccaagctctgcccgatgacatctngatgcaggtctccaccaagaaaacggcggcggaggtgtgggcn

SEQ ID NO: 6074 - DNA, 307 bp, Zea mays
  misc_feature: Incyte ID No: 700382965H1
  unsure 33, 62, 66, 77, 81, 128, 144, 181, 183, 201, 204, 210, 218, 223, 226,: a, t, c, g, or other
ggaagtcggaaagaatccctcctgttcttcgtnaaccctccagaacctgctctctcttcctnctangagactacgancgtntaaggacatgagccgtcgagcgcttgaagaccgggttcgagcagttncaaggccgacgtctangacaagacagccggagctgttcgagcccactcaaggncncaccagtcgcccaagtantgntgttcncctgctancaatnccnacgtgtnccccgtngntgnaccctgggcctncaaccncggcgaanncttngcctncgaacatngcaagnngggtggcggcc

SEQ ID NO: 6075 - DNA, 291 bp, Zea mays
  misc_feature: Incyte ID No: 700382966H1
  unsure 15, 123, 134, 148, 158, 168, 171, 178, 203, 207, 224, 228, 242, 263,: a, t, c, g, or other
aacaagatacgagtnggactgtagctttcgtcacggtagtttagttgaagaggttgatggtcacactgcaatactatatcataggttgcagctgcactggtgcccaatgttagtttggcctcnggatctttgtnatgctcgatattgncgtcgtaatnatgatggaanttnacttgtnctgttccggtctatagaacatcccnaatngtggtccggcaagaggntttntgagggcattcatnaaatggaggtttcaagattcnccnctcantgtnacaaggaaaacctcgt

SEQ ID NO: 6076 - DNA, 289 bp, Zea mays
  misc_feature: Incyte ID No: 700382967H1
  unsure 47, 58-59, 85, 116, 126, 153, 171, 199, 211, 218, 226-227, 233, 235, 264: a, t, c, g, or other
ggactacaacctaaatctgatccagaacgtgctgataataggatgantgttgcacgtnnttgggttggaccttaacacagtaganagtcctgatgtagcagagcctaaccctttcntcccttacangaaattggggcagttcaaaagtcagcnatccatcggaatgtggcngcactactggtgctatagaagaaagcgnatcacacggaantggaganaatgagcnnatggcntncttcttcatctctgggatgcggtggtgcntaggccagtggtcgaccccccaaag

SEQ ID NO: 6077 - DNA, 267 bp, Zea mays
  misc_feature: Incyte ID No: 700382968H1
  unsure 17, 22, 38, 48, 54, 58, 70, 77, 90, 94, 112, 142, 157, 163, 177, 194,: a, t, c, g, or other
gctgggtcctgggtgcntcaanattgttcgtggagaanttccagtgcnaccgtngcantgggctgctccncgccgtnaaactcgcgggtngccntgggctccttcttccccnccccactccgaaccgtgtcccatcgatgcntaggtaatcgaatcntggcancatggcgggcatanctgggaatgcaacaccnaagnagaatgcngccncgtggantccagactagatgtcgcncggtctnggttgcattaggacntcatcagggt

SEQ ID NO: 6078 - DNA, 296 bp, Zea mays
  misc_feature: Incyte ID No: 700382970H1
  unsure 2, 10, 87, 89, 110, 119, 168, 170, 172, 183, 190, 196, 234, 250, 280,: a, t, c, g, or other
gncgaaagangtcgcctaattctttcgatcgaattaggcgccttcttcgtcccacgctccgtctttatttgtaatctgaagcttacnangaacatttgagtggatcatgnaccggattngtaggcctcttgaaagtccgggtggtgaggggctcaaccttgcctaccncnangcaagagggcncgatccntatgtngtcctacgattggcaagaagaaattaaagacgagcgtnaagaagagatctgtgnaaccccatctggcacgaggagctaactctnaccgtcacaantccaa

SEQ ID NO: 6079 - DNA, 291 bp, Zea mays
  misc_feature: Incyte ID No: 700382972H1
  unsure 112, 158, 219, 224, 231, 235, 238, 241, 248, 256, 261, 263, 265, 285,: a, t, c, g, or other
cgttatcctcctcttacattacaggtcatagctaagcaggtctgacaggatgtcgtggcagacatacgtacgatgagcacctcatgtgcgagatcgagggccaccacctganctccgctgccatagtacggccacgacggcgccgtttgggcccagancaccgcattcccacagttcaagacagaggagatgaccaacatcctgaaggattcgaacganccggnttctggncccnacnggnatcttcntcggtccnaccantnantggtcatccaggcgaaccgncatntc

SEQ ID NO: 6080 - DNA, 290 bp, Zea mays
  misc_feature: Incyte ID No: 700382974H1
  unsure 88, 90, 99, 147, 187-188, 199, 215, 225, 229, 239, 243, 245, 289: a, t, c, g, or other
gatgaacttccccaaggcagaagtgctcatcctcaacttcgcctcaagcctgtaactacctcccgccgttacatcgcgtcgatgcagnanctgaaagcncctggtgctgatcaactacggcacgagcagcgcggcccttgacaaccnatccgccttcacaaggctgaaaggcctaagaagtctctgnntgaaaaagatnaggctcccgcggctgnccgaagaccnccanccgctgaagnaccngnacagatctcgctctctctgggcatgaacagcagctgagaaggtng

SEQ ID NO: 6081 - DNA, 296 bp, Zea mays
  misc_feature: Incyte ID No: 700382975H1
  unsure 17, 50, 101, 176, 208, 256, 290-291: a, t, c, g, or other
agcccaccgaattcccngcgattcctctcccctcgcctcctacgtctccncctaggggatacgtcggagaggaattcgcaaagagggccgtctcatccganttaaggaagccatggagcacaaggaggctgggtgccaggcccccgagggacccatcctctgcatcaataactgtngcttcttcggcagcgcggcgaccatgaacatntgctccaatgccacaaggagatgataacgagcaggatcaggccaagcnggttgcctctctatcgacagcatcgtgaacggcnncgagc

SEQ ID NO: 6082 - DNA, 295 bp, Zea mays
  misc_feature: Incyte ID No: 700382978H1
  unsure 94, 166, 182, 186, 193-194, 220, 238, 245, 252, 255, 270, 275, 287, 290,: a, t, c, g, or other
ggagatgctgctggctgccattgcctgcagtaaaattaaaggagggtcggagggagatgctgctggctgccattgcctgtattcggttggattnccgtttatatatatatttaagtactttaatttgggtctgaacatgtcgattgatccattcattttatttgcnttgccatttctccccnttcngtgaatnncgatatgtaaagaggggagatggganacactattcgtttggacntgacatnggacatnaancaatcacccattgtnaaaanaaaaaaccgaanaancanac

SEQ ID NO: 6083 - DNA, 188 bp, Zea mays
  misc_feature: Incyte ID No: 700382979H1
  unsure 76, 169: a, t, c, g, or other
attcaagcacctcctcctcccccgccggccaacaactcagccgccgcaaccgccacatcagccatgggcgcctgcncaaccaagcccaagacgcttgaggggcaggccccagctgaggccgccgtctccacacccaaggttgcgcccgaggccactccaatctccgttnaggttgcggctgatgaaca

SEQ ID NO: 6084 - DNA, 286 bp, Zea mays
  misc_feature: Incyte ID No: 700382985H1
  unsure 6, 30, 54, 89, 96, 115, 122-124, 141, 151, 156, 160, 164, 204, 215, 226,: a, t, c, g, or other
gttggngaagccatgactactctgccaganaatttcaagcctcacagggctgtnaagaagatttttgatctacggcgtcagatgatcgngactggngaaggcattgattgggcanttggtgnnncattgcttttgataccntataattgangggancctntcangttaagtgatcaggatgtcaagaggggtacatttagccancgacatctgtngtccatgagcnacanactggcagagcntatgnncnatgggaatcatcttgtanngaacnngntgcggantt

SEQ ID NO: 6085 - DNA, 291 bp, Zea mays
  misc_feature: Incyte ID No: 700382987H1
  unsure 53, 92, 110, 139-140, 158, 163, 170, 203, 215, 218, 225, 227, 231, 236,: a, t, c, g, or other
ggatttcagcagcaattaataattaaagtacgtgaaattttgaccgacaaagnatggcgtaggagaaaaatgcaaatgaggatatcagaggnagaaggaagacttaaganggatgaggaggaaacaaaagagatgtggnngaggccgagagagcatgnagagnattgggnggagcaccagagacaagcgggtctccagctggngggctttcctgnagncaggacngncggnagganagtgaatcnaacccccaaaactgaagangcagctccgaacaatcntacgtgcaaa

SEQ ID NO: 6086 - DNA, 279 bp, Zea mays
  misc_feature: Incyte ID No: 700382988H1
  unsure 11, 54, 61, 63, 82, 84, 92, 110, 113, 161, 176, 178, 181, 192, 205, 228,: a, t, c, g, or other
caaggagtacngcatgcacgtgaggctcgtgcctggtgaaaccgctgggtgcanggagttntngtggcgcctgatgtgcttntnatcgatcntttgctgccgtgatgccnctntcatcgtcgtgggtcgccgcacccggaccttgcatgaccgggcctctnctactcgttgggtgntngtngggattcattnatgcatgtggagnctggtcgtaatatcatcgaaganaagggcttactgtgcggcaataatgctcatagaaacantcatccgccgaga

SEQ ID NO: 6087 - DNA, 288 bp, Zea mays
  misc_feature: Incyte ID No: 700382989H1
  unsure 26, 44, 61, 82, 92, 100, 138, 228, 231, 240, 265, 275: a, t, c, g, or other
ctgacggcgcttttgtctccggtganttttgtggcgggaagctnctgcgctggtgcttagnaaccgactttcctccggactncctgcacganctgctccnacagccggcgatccactcccggctgttcccccggaggntccagaggcctttcagaaggagaaggcagctctgtttctctgcacaggagtagggtcctttcagccatgaagcatgtgttgaacctctanctnttaggtgtngtatgaccctatctccatcttcgtnagagtgatgnagtccctagaggg

SEQ ID NO: 6088 - DNA, 240 bp, Zea mays
  misc_feature: Incyte ID No: 700382992H1
  unsure 17, 25, 38, 43, 58, 60, 63, 67, 74, 79-80, 82, 90, 101, 105, 109, 119,: a, t, c, g, or other
aaccagacaagcaaggnatcccccnatggctcatcgcnttctnctactactctctctngngtnggcngccgcgnttgcnncngccgtcanacgcggagganccgntganccggcaagtngttcccggtgganatganaacgatctggagctgaagcggagtccaattcctgagttngtgcagnggttcgcaagtccaanaagacgccgagaagccagcgtacnggctntcgttttcnnng

SEQ ID NO: 6089 - DNA, 294 bp, Zea mays
  misc_feature: Incyte ID No: 700382993H1
  unsure 237: a, t, c, g, or other
aggagacagcaagaagggttgctaaccttcagcttgaatgcaagatccagatacgatgtggaaagttttgtgaattccttccgacccgacataatggaagcggtgtattcatgggccagagggtcgaagttctaccaaatcatggagatgacccaagtgttcgaaggaagcctgatcagggccatcaggaggctggaggaggttctgcagcagctgattactggcatccaagtaccntggggaaaggattagaagcaaaacttcgaggaggcggtcaacaagatcagagggact

SEQ ID NO: 6090 - DNA, 296 bp, Zea mays
  misc_feature: Incyte ID No: 700382995H1
aaggaaagcaatcacagccagacgagatccgagcagagaaggggagctacctgctacgactagctagattccacacgcgatggcgcccaccaggatccgcgtggccttgctgagcttggcgctggtggggctgctcatctgccacctcgccaccaccgcctccgcggggaagaacagaatccgcatcctcgacagcgtcgacgactcggccggggacaacaacagctccgacgcctcggccggggacaacagcaaccgactccgagtcggaaggccgcgtcgtctattccgacatg

SEQ ID NO: 6091 - DNA, 297 bp, Zea mays
  misc_feature: Incyte ID No: 700382996H1
  unsure 7, 26, 32, 34, 45, 52, 54, 58, 60, 74, 87, 91, 102, 107, 113, 124-125,: a, t, c, g, or other
ggaaganctcgtggacgccgacattnatgacngnaacaacatgcnacgtgcntnttcntnctctggcgggctangtccggggcggtnggtncatcatcatcnccgcnggcgancccgccgaggnngcattcaccgcggatgttcgtnccccagagtcctgtaactccattgcaagagctacagaagtnntaatncggtgttcaaccagatattgatgaatcaacaaacatgaggattctgatggcccgcctnaaaangaaatnncccaagttgctcagtgcatacttngaggaaaga

SEQ ID NO: 6092 - DNA, 308 bp, Zea mays
  misc_feature: Incyte ID No: 700383002H1
  unsure 278-279, 282, 297: a, t, c, g, or other
gtgtttcgtagctccccgggtgttttccctgtgcagccgagcttggggaaactgccatgctttttggatgtcaaggcgctgttggaggctgggtgtgacagcacagagccaggttgtcttgtggaaaccacagccacgggtttgccactggctcagcatggcctcactgccagtcccagcctggctgagggacaagatggtttctcttgggagttcctgagtggagcacccttccaggctttttgaagccagctgatctgtggagcctgttaaggganncantacggtgtttggatntgagtttttcc

SEQ ID NO: 6093 - DNA, 300 bp, Zea mays
  misc_feature: Incyte ID No: 700383004H1
  unsure 2: a, t, c, g, or other
anttgatctcccaatacttgtagtgctggatgaagcttatattgagttttcaagccttcagtccaagaatggcatgggttaagaagcatgataatttgattgttctccgaacatttagcaaacgggcaggtttagctggtcttcgtgtgggttatggtgcattcctctgagcattatcgagtatttgtggcgggccaagcagccctataatgtttctgtggccgcagaagtttcagcagtgcagctttacagatccaacttatctggagaagtgaaaaattatggtaaaagaaaggagag

SEQ ID NO: 6094 - DNA, 299 bp, Zea mays
  misc_feature: Incyte ID No: 700383007H1
gggatctgcatcgccgtgtgctccctcaccttctggatctgcgacatcatcgtcaccaactctctccctgtgatgctcagaaccatcggcctcgcgggtgtatttggctcctacgccttcgtctgctgcttgtcgctcgtcttcgtgtacctcagggtgcccgagaccaaggggttcccgctcgaggtcataatcgagttcttcaacgtgggtgccaaagctcagaagccggagcagcatgaagaggaggagaaccacgactaacccgtatatattggatcataataataatgtttttt

SEQ ID NO: 6095 - DNA, 304 bp, Zea mays
  misc_feature: Incyte ID No: 700383009H1
cggggctggcctcgacgtcttcgtccacgtggggacgtattccccgccgatctttggagaatcgggggccaggcttgccgcggccggcaggggaagggacgccgctgccgccaagtacgcgtcctgggccaggatccggaagagtttggaaaagatgaggcctcctggggtcactgagctcttgctgactaatgacggggatcacattcttgaaggcgctgttacaaacttctttgttgtctgccaacaggaggaatgcgagagcaacggaaaattctctaatcaaacaatggctataagtttg

SEQ ID NO: 6096 - DNA, 299 bp, Zea mays
  misc_feature: Incyte ID No: 700383010H1
  unsure 35, 49-50, 118, 144-145, 248, 270, 291, 296: a, t, c, g, or other
agtttggctgcaatagtggagaatgaacataagangctgcttgcaaggnnagtccatcattgaaaaacgtaaagaagagcttgagcgtcaaatattggagaaggaaaaagaagaaganaaaaagagaatgagcagtcaaaagannaactgtggatgaggaaagggtgaggctctcaatgaacagaggcagagggagcaggaccggattcgtagagagatagaggaaaaaaataaagcagaagcaaaangctgctagagtttgaataggcnggaaaaaactgtcttgttgtnggggncta

SEQ ID NO: 6097 - DNA, 300 bp, Zea mays
  misc_feature: Incyte ID No: 700383011H1
  unsure 2, 47, 155, 211-212: a, t, c, g, or other
cnaactccaaccaagacgaacgatttcatcccactaaatcctttttnttttcttttcgtttttatttttaatttcttggttcggttcttgatcacctgttcttccttatgaccttatccaggaaattagattatcaggtgcattttgtgtgaggntccagacgcaggaggatggctctcaagaagttgctgcagctcttttgtgtcggaannaaggatccaagaagaaaggtaaatcatcgatccactctggcaagcctctgcctcccgctcctcgtgaatgtcactgcaaacaagactc

SEQ ID NO: 6098 - DNA, 306 bp, Zea mays
  misc_feature: Incyte ID No: 700383013H1
  unsure 119-120, 184: a, t, c, g, or other
acacatacaggaaagcaagcaagaatcatcggaataatggcccgtgcatgcgtgttcctcgtcgtgctcctcctggccgccatcgcggtggcaccgttcgcgggcgccgcacgcgtggnncttgtggagggtaggtccatggcatccgccgatgcaccggaggcggcggccgatgctcccgctncctagccccgacttccgcctcatccccagactcgtcatcggaggcgccctctagcagcagttcctccgactagacgcaaaaacctcttcattctctggaataataacagtatatagttgcac

SEQ ID NO: 6099 - DNA, 306 bp, Zea mays
  misc_feature: Incyte ID No: 700383015H1
  unsure 2: a, t, c, g, or other
gnacctgaaaagcgggttttggcttgtgtgcagggactctggtggaagaaagggtgacagcacctggcctgggcatgacacaagttaggacccgtaccaagaggccctggaattgagggtgggggttgctgtggactctttctccctcttaggaaactctattgggtctccatctgtcacagaagcagtaaatgatgtaggggctgccaggtatagggtcctgtggggatgctggaacatgccgaggcaggacgtgccagccaccctctgcccatatgtgcagcagggccacagatgtgcttgtcg

SEQ ID NO: 6100 - DNA, 249 bp, Zea mays
  misc_feature: Incyte ID No: 700383018H1
  unsure 4, 8, 49, 111, 143, 158, 188, 224, 237, 241, 243: a, t, c, g, or other
agtntggntgcaatagtggagaatgaacataagaggctgcttgcaaggnagtccatcattgaaaaacgtaaagaagagcttgagcgtcaaatattggagaaggaaaaagangaagaaaaaaagagaatgagcagtcaaaaganaactgtggatgaggnaagggtgaggctctcaatgaacagaggcanagggagcaggaccggattcgtagagagctagagganaaaataaagcagntgcnanaaactg

SEQ ID NO: 6101 - DNA, 300 bp, Zea mays
  misc_feature: Incyte ID No: 700383019H1
  unsure 44, 59, 152, 208-209, 237, 278, 299: a, t, c, g, or other
aactccaaccaagacgaacgatttcatcccactaatcctttttnttttcttttcgtttntatttttaatttcttggttcggttcttgatcacctgttcttccttatgaccttatccaggaaattagattatcaggtgcattttgtgtgaggntccagacgcaggaggatggctctcaagaagttgctgcagctcttttgtgtcggaannaaggatccaagaagaaaggtaaattcancgatccactctggcaagcctctgcctcccgctcctctgtgnaagtcatgcaaacaagactcnt

SEQ ID NO: 6102 - DNA, 306 bp, Zea mays
  misc_feature: Incyte ID No: 700383021H1
  unsure 83, 199, 233: a, t, c, g, or other
aacacatacaggaaagcaagcaagaatcatcggaataatggcccgtgcatgcgtgttcctcgtccgtgctcctcctggccgcnatcgcggtggcaccgttcgcgggcgccgcacgcgtggacgttgtggagggtaggtccatggcatccgccgatgcaccggaggcggcggccgatgctcccgctcctagccccgactnccgccttcatccccagactcgttcatcggaggcnccctctagcagcagttcctccgactagacgcaaaaacctcttcatctctggaataactaacatatattacgtt

SEQ ID NO: 6103 - DNA, 299 bp, Zea mays
  misc_feature: Incyte ID No: 700383023H1
  unsure 2, 285-286: a, t, c, g, or other
gnaacctgaaaagcgggttttggcttgtgtgcagggactctggtggaagaaagggtgacagcacctggcctgggcatgacacaagttaggacccgtaccaagaggccctggaattgagggtgggggttgctgtggactctttctccctcttaggaaactctattgggtctccatctgtcacagaagcagtaaatgatgtaggggctgccaggtatagggtctgtggggatgctggaacatgccgaggcagaacgtgccagccaccctctgcccatatgtgcagcnnggccacagatgtg

SEQ ID NO: 6104 - DNA, 299 bp, Zea mays
  misc_feature: Incyte ID No: 700383026H1
  unsure 2, 78, 275: a, t, c, g, or other
gncaactgaactcaacatcaacggtgaatagtgggtaggacttgacacccgcaacctgaagattgtcacactactgcnacgccaggtggtgtacggtgctgtcgataatcggatatctagaagctgaaagctgccgccgcgacttcgacgtcttgtacgggaccacttcgacggtatggagtcagatgatgaattcaatcagtttgtatgaagacctgattgatccgtcatcttcggatgatgagaatgatctgttttttgatgccgcgcagtgnatcgttgatgatttagttaatcat

SEQ ID NO: 6105 - DNA, 300 bp, Zea mays
  misc_feature: Incyte ID No: 700383027H1
  unsure 7, 9, 16, 22, 24-25, 27, 83, 111, 141, 145, 152, 178-179, 188, 215, 223,: a, t, c, g, or other
cggggcnancgcggcncgatgntnncnggggcaggtcctgatacgcgggctgcagcagattcaccggccacggcggtctccgnggctatctacgggtttttttcaggaccnatgatgcgaagttggtacatagtgggggangacnatatggncacaactactatgaagacaacaagcnntttttggcntcgttcgctcacagtatggactgctgntcctccancaacacaaccactcactgctctaaattcnttgggacgagccatnatttcaacgtgnctggcaccccggnncatctgt

SEQ ID NO: 6106 - DNA, 307 bp, Zea mays
  misc_feature: Incyte ID No: 700383031H1
  unsure 294-295: a, t, c, g, or other
gtagccaaaagctgtttgctgatgcattggtaaagaaagcatacgataactggatgtatgtacattgaatatgatggcaaaggtcttttgaaccctaaaccaaagaaaaagtctgcatccactggtcaagtggagacacatgctcctgcgggtggcccgacttcatatcaacaatacctctcttcgatgagcatgccagggccatcaccatcaggtggaatgattctgcagggtatggcgtcgaccaaagcgcaacacatccatctcagctggcagagttcatccaccaatgtnnaggcaccatatg

SEQ ID NO: 6107 - DNA, 310 bp, Zea mays
  misc_feature: Incyte ID No: 700383032H1
  unsure 13, 35, 43, 45, 58, 133, 165: a, t, c, g, or other
ctcgacgcgtctnttccacagccgcaacctctatnccttcgtntnggtatcgtctctnccacacccctctgccccaacccagaaaaacccttcgaaaagcggcggcggcgcgacatggcggaggtcgaggctncagctgctgcggttgcggcggcgacccctgangtggcgacggtgaccgagggcggagcgctacggaggcgaagggtccgcataagctgcaccgccagtggaccttctggtacgacatccagtccaagcccaagcccggcgctgctggggcactccctcaaaaaggcgtacacttcga

SEQ ID NO: 6108 - DNA, 304 bp, Zea mays
  misc_feature: Incyte ID No: 700383033H1
ttgaagcaatctgcgtccgtgattgaccagagccagttctggcaagattggggacagtggcacaagaaagataggctcaagaacttctacactgaagacatcaggatgaccccaatgaaacttcgtgacatcaaggacacattgatcatgaggaagtttgggaatgttgagcctgataactattggtcacgtgtgtgcgagggtgagactgagggaataatcaagcgcccatggcatttcctgtggaaatctcgtcgctgatggagatgtatctgccatgcctcacggatgaatgggatttgac

SEQ ID NO: 6109 - DNA, 304 bp, Zea mays
  misc_feature: Incyte ID No: 700383035H1
  unsure 35, 70, 233-234, 276: a, t, c, g, or other
ggacatcgacgaaagctagccagctagtaacaagnacaaaaaacaccatcatctcatccgcccgttctcnacgccaccctagccctgtgatatacaatggcggcccagagcacgaggatggtggcgctggccctggtggtcctcctggtggtggcgacggcgttggtgcccacggccaccgcgtacggctgctacgacgactgctacgagcggtgcgccaacggcaagaaggnngaccccgcctgcaccaagatgtgcaaccaggcgtgcggcacnccgaacaaggcgccgcgccgggcgccgg

SEQ ID NO: 6110 - DNA, 296 bp, Zea mays
  misc_feature: Incyte ID No: 700383036H1
  unsure 29, 39, 52, 161, 248: a, t, c, g, or other
aatcaatgaagtgcttgacagagcgaaanttgaagccgnaaagttggatctngagtctgtaccatttgacctgagatccatccttgatgatgtcatctcattattttcttcaaagtcaagagagaagggaattgagctgctgtatatgtcctctgaaaganttccggaactactgttgggtgatccggaaggtttcggcagatattacaatttagtgggcaatcaattaagttcacagaacggggacntatttttgtacaagttcatcggcagatcactcaaatctgcaacagaac

SEQ ID NO: 6111 - DNA, 296 bp, Zea mays
  misc_feature: Incyte ID No: 700383037H1
  unsure 2, 40, 96, 148, 184: a, t, c, g, or other
gncaaagaattccctcccctagccgccgccgccgctcgtntccctgagaggtgccgggaccgaggaactggccgagttctaggtagagaatcggtnttgcttgtctcagcacggggtctgctgcgtctggtggtggtgaaggggaganattcgtgagatctgttccggatcaggcgtgcgagcncgggaatcaggggtttcacacatagctcgtcgatttgaatttgatgtactaatggagtctaagggtggcaaaaagtctagcatagtcgttccatgatgtatgaagctcccct

SEQ ID NO: 6112 - DNA, 298 bp, Zea mays
  misc_feature: Incyte ID No: 700383038H1
  unsure 207, 239: a, t, c, g, or other
gggacctaggtcgcggcgacatggccaaacgtaccaagaaagtcgggatcgtcggtaaatacgggacccgctatggggcctccctccggaaaatggtgaagaaaattgaaatcagccagcacgccaagtacacttgctctttctgtggcaaaaccaagatgaagagacgagctgtggggatctggcactgtggttcctggcatgcgngacagtggctggcggtgcctggacgtacaatnaccattccgctgtcacggtaaatccgccatcagaagactgaagattgaaagaccagtag

SEQ ID NO: 6113 - DNA, 299 bp, Zea mays
  misc_feature: Incyte ID No: 700383039H1
  unsure 65, 120, 122, 275-276: a, t, c, g, or other
gtgccggcatcatccgtctcgtctcgtctcgcctctcctctccttttcccccctccctgcacagngccgctgcaccgtcaccggaccacagcagcgatcgatggctgaggtacacaacgngntcccccgtggggatggtgggcggcgtccgggacgcgccggtgggccgcgagaacgacctcgaggccatcgagctcgcgcgcttcgggttcgccgagcacaacagcaagaccaacgcgatgctggaattcgagaggctggtgaaggtgaggcannggtctggccgggacctgcaccac

SEQ ID NO: 6114 - DNA, 294 bp, Zea mays
  misc_feature: Incyte ID No: 700383041H1
  unsure 207: a, t, c, g, or other
aacatccaggtggctttatttgggccagtgaaaaaacaggattcaggcatttatatgttcatggcaatgatggagcatgcttaggacctctcacacaaggtgattggatggttgagcacattgctggtatcaatgagagtaatggacttatatatttcactggaacattggatggaccattggagacaaatctctaccacaccaatnctctttccagattggagcctccctggcaaacccctaaaaggcgactcgtggaatggccggcatcagtattctcgaccatcagttgct

SEQ ID NO: 6115 - DNA, 297 bp, Zea mays
  misc_feature: Incyte ID No: 700383042H1
  unsure 98, 190, 212, 267, 293: a, t, c, g, or other
tggatctgaagaatttcaggacatggtagcagctacgttttcgtcatatgatccgaatagaacagtgatccaaatgcgaccctaggaacacagaaganatggaattctgggacggcaacaatgcaaacatcgcgcaaatggcacggggcagccctccggggaaaccggcggtggcgcatgtgtgccaggncttcaagtgcagcccgccggtnaacctctcctgggtcgcttcgcgagctgctgaacaagacatggctgctgcaactncagcctgaggccttttgctctgctangttc

SEQ ID NO: 6116 - DNA, 300 bp, Zea mays
  misc_feature: Incyte ID No: 700383043H1
ggtgatccatttcacaagaggaagaggacaggaggtcggaacaggaactgtcgtcgatattattcttgtgagttccaccccaaaacgaagcaacacgccttgcccggtgtgcaccgacgaaaccagcgacagcagcacagagacgaacggcgtggtatcctcctgtctcagctgcttcctagctgggggtgctctctaccgtttcgagtacgcatccaacccggcgctcttcctcgccaaagcgcgaggagggactgcacgctcgctccctctggaccctggacggacacggtggctcgc

SEQ ID NO: 6117 - DNA, 304 bp, Zea mays
  misc_feature: Incyte ID No: 700383044H1
  unsure 148, 299: a, t, c, g, or other
gggcggcgacatggtgctcgaggcgacgatgatctgcatagacaactcggagtggatgcggaacggcgactacgcacccgtcgcggttccaggcgcaggccgatgccgtcaacctcatatgcggtgccaagacccagtcgaacccggngcacacagtaggcgtgatgacgatggccgggaagggcgtccgcgtgcttgtacacttcccaccagcggaccttcgggaagattctcgcctgtatgcacgggttggaagttggtgctgaggcaaattggctgcggcaatccagttgctcagntgcgc

SEQ ID NO: 6118 - DNA, 138 bp, Zea mays
  misc_feature: Incyte ID No: 700383045H1
  unsure 2, 25, 50, 109, 111-112, 114, 118, 122-124: a, t, c, g, or other
tncatatcccctctcccctgagcanattctcatccaaagaatcatgaggnactaaaatggttgttctttcatgttactatgtttagaggtggtttgttccacacaacanannanaccntacnnnaattagcctggcct

SEQ ID NO: 6119 - DNA, 305 bp, Zea mays
  misc_feature: Incyte ID No: 700383047H1
  unsure 6, 9-10, 14, 21, 24-26, 45, 57, 65, 71, 73, 75, 78, 82, 98, 102, 116,: a, t, c, g, or other
tcatcntcnncagnatccatngcnnngatcacggtccttaacctnctacttctaccnacgcctantgtacncnangtnaatnacactacgccccatgnctancaacgtgtaaatangatgacagtttgagcacacagaaccgaccccatgtcctccccngactnatcgnccttaccacgntactccctacctatctcccctttgatgctactaagttataaancaacancaggtgcgtaatttctcagtnnatcccacnatgnggatgggaaaaagatccgntaggagacngagcatncggnnac

SEQ ID NO: 6120 - DNA, 307 bp, Zea mays
  misc_feature: Incyte ID No: 700383048H1
  unsure 4, 128-129, 184: a, t, c, g, or other
tganacttctccgccgcctccgccgcagacgcagtcgcgatgcgctacgtcgcctcctacctgctggctgccctagggggcaactcctcccccagcgccaaggacatcaagaagatcttggacagcgnnggtatcgaggcggacgacgaccggctcaacaaggttatcagtgagctgaatggancaaaacattgaagacgtcattgcccagggtattggcaagcttgccagtgtacctggctggtggggctgtagcgtctctgctgccccaggctctgcagcccctgctgctggttctgcccctgct

SEQ ID NO: 6121 - DNA, 300 bp, Zea mays
  misc_feature: Incyte ID No: 700383049H1
  unsure 2, 12, 47, 296: a, t, c, g, or other
gngacgaaagangcgcaggggaaggaagccttttgcttttatcaggnaatcaatgacattaatacaacttagaaggtaatatatcaaaagccaattgctgcaagtgacgtgttgctaactagaaactaatgaacgagggagttctttactgaaaaatcaggtgcatgaaatggatgatatcttataactatttatgtgaacagactagtgttaatgtgatatgtttaatttcgatgtgctgtgcacacagcattgtcagagcagttgctcccatattacaaagttgaaaacgaaantata

SEQ ID NO: 6122 - DNA, 298 bp, Zea mays
  misc_feature: Incyte ID No: 700383050H1
  unsure 2, 243, 282: a, t, c, g, or other
gnaagcagtttattgaggcctatagtgcagcatattacccatgcatggacatattgtatgagtgctatgaagacgtctcttctggaagtgagattagaagtgtggtgttggctgggaggagattttatgagaaggaagggctcccgctttccctatgggaaaaattgatcaaacacgtatgtggaaggtgggtgaaagggtccgttcaaccaggccacaaggtgatctggcccactggcatcnctcactgctggagtgtagttgcactaatgatggctcagntgaggtcctaggaaga

SEQ ID NO: 6123 - DNA, 300 bp, Zea mays
  misc_feature: Incyte ID No: 700383051H1
  unsure 43: a, t, c, g, or other
ttcccagcggcttcccccaaacaaaacctcttctccgccagantccgcgtccgcgtcggccagattcaaacgaattcggcacgacgcatcggcatcgcctccgacgatcttgagacaaacaaaacccaccgctgcggcaactccgcctcccgccgacccggggatcgcctgacaacaggcagcgaaaaggggcgcagggtttgcccgccaagatggaggacgtggacgtctcgcggcagtgaagcagatgacggattcatccgccagaggccgtcgagaaggccgccgagatcgaggccg

SEQ ID NO: 6124 - DNA, 287 bp, Zea mays
  misc_feature: Incyte ID No: 700383053H1
  unsure 25, 35, 43, 98, 139, 141, 150, 246: a, t, c, g, or other
gtctacagctggtgataaacagccnagagtttcantctggganattgagccactgacaacctttccgatgtacccaactgcttttccattaaggctanagcgtccgtgggcttcaggactacctatgttcaatggtggnangagcgacgngttcgctcgttattcttctctcatgtggctcgagatggaaaccgaggggctcagtcatgaactccagggattggagcatcaccaggctcagccaanaatagatatccatgttgagtctgaagccagatattaccagc

SEQ ID NO: 6125 - DNA, 293 bp, Zea mays
  misc_feature: Incyte ID No: 700383054H1
  unsure 50, 65-66, 69: a, t, c, g, or other
tgcaagctgctcgcgcctctgttcctggccatggtggtgttgtggcgtanaatgtccgtgtgtgnngcngtagccatcctggcccatagcagtccgcgtagtagagttcgcccggccgcgacctcgctttactcctcgcgccgttgctcgtcgagtcctaggcatctgcgcgcacgtcttatttggcgccaaacatcttcgtgccacacatactcatctttgctagctggccgtgcacctcactccgttgttctgagtccgccagttaccatgctcatccgcatcaagacatc

SEQ ID NO: 6126 - DNA, 271 bp, Zea mays
  misc_feature: Incyte ID No: 700383057H1
  unsure 23-24, 40-41, 267: a, t, c, g, or other
gtaaaatcacttccaggaataannaattgatgagaagaannttgtttcatctactggtacactgtgcttgtcagagatcccgaaaaaactggtggtaatcggagcaggttatattggccttgagatgggttcagtctggaaccgccttggttcagaggtcactgttgttgaatttgccccggatatagtaccatcaatggatggcgaggtcaggaagcagttccaagcatgctagaaaaacagaattcaagttcagctcaagacaangttg

SEQ ID NO: 6127 - DNA, 297 bp, Zea mays
  misc_feature: Incyte ID No: 700383058H1
ggcacgtccatgtcgtgcccgcacgtctccggcgtcgctggcctgatcaagaccctccacccggactggagccccgcagcgatcaagtcggcgatcatgacaagcgcgacggtgctggacgcggagatgaagccgatcctgaactcgtcctacgccccggcgacgcgttcagctacggcgccggccacgtgttcccgagccgcgcgctggacccagggctcgtgtacgacatgaccgtcgtggactactcgacttcctctgcgcgctcgggttacaacgcgacggccatgaggacga

SEQ ID NO: 6128 - DNA, 300 bp, Zea mays
  misc_feature: Incyte ID No: 700383059H1
  unsure 15, 26-27, 29, 31, 189, 248: a, t, c, g, or other
acccatatgtttgtnccacctagcgnncntncccagctcttcagcaacagccaggcccttcgcctgtaccagtgcctcagcaaacagtgaaggcatttactcctgcgaacccagctggtctaaaaaatccgggacaatatcagcaacctaataccctaggttcccagctttacacgggcactgcaaatncaacagtatccttctggaccatctgcttcttcatccaagcggacctccaacaacatttncatcagcctgtatcacctgttcaatatcagcctgttgctccaccagtatctt

SEQ ID NO: 6129 - DNA, 264 bp, Zea mays
  misc_feature: Incyte ID No: 700383061H1
  unsure 7, 12, 120, 178: a, t, c, g, or other
cgcgccncgcanaatccaaatccgatcgatctccgcggcctccagatcccccggcgggcggagacggcgagctccaggcggccaagaagcccccccctcgcagcgctcctctcctctgcntctccgaatcccttaccagggggaaaaaacattgcctgaaagttcttcaggccctggngtagcagctgaattacccatttaatggcgaagaacgagctttagatggtctaaagatggagatgagatagaagcaccacaagtgta

SEQ ID NO: 6130 - DNA, 300 bp, Zea mays
  misc_feature: Incyte ID No: 700383062H1
  unsure 44, 253, 263: a, t, c, g, or other
ctcaaagccaagcaacagcagcagcttccctagcaacaccttgnccctgagctcatgggatccctgggccccacagtgagcttgagcatcatggccaggccaggcggccagcagccggcggagatggagaggaagaaggacagcggtgtcttcttcggtgggggctgcggcttccggatgccgctgcactacccgcgcttacaagaaggcggattacgagagcatgccggagtggcgcgtcgactgcctgctnccgcgagtanggcttcccgccgacggcgaacgtcgacagcaagcgcc

SEQ ID NO: 6131 - DNA, 300 bp, Zea mays
  misc_feature: Incyte ID No: 700383064H1
  unsure 81: a, t, c, g, or other
ccgcaccactgggtggtagaaaggttctttttcttggatctgagatgaggattattgataacctgtctcgcaagaacagcnccaccgctcctgatcaagctggggaagttgaacagaaggatgataatatgtctgacgaactgatgggcagtgccatgtcccttggtgacatcatcaactcagaggattacactcgtgttgtctcccgtggccctaatcctaggactacccacttttttggagatcgtgtttttgagcttcaagctgagcagctgatgcctgttgagagtaaggtcgatc

SEQ ID NO: 6132 - DNA, 264 bp, Zea mays
  misc_feature: Incyte ID No: 700383066H1
  unsure 23: a, t, c, g, or other
atcatctacaattatggcaaggnggaccagtaaacaagagtcctgcaagcgggggcagaacttccacagttccaaatcacttcctgtttaatcgagttgttgtacgagaaataagaatggaaattactggactccatccatgcttctcatttgcttgttctgataatcatatgctctcatctagtgcatattgaagtgatgtttcctgtcataaaatggattgtactatcttgtcgtgcagtttaaactgaccgccggcatctc

SEQ ID NO: 6133 - DNA, 165 bp, Zea mays
  misc_feature: Incyte ID No: 700383067H1
caattgtattttagtttagatttagagtacacttatgtatgcgttgtttgacaatgcttatttttaatataatataaataagtaccattcaatatatcataaataagcattgtcaaacaacgcttatttatgatatattgaatggtacttatttatattatatta

SEQ ID NO: 6134 - DNA, 294 bp, Zea mays
  misc_feature: Incyte ID No: 700383069H1
  unsure 58, 116, 245, 258, 273: a, t, c, g, or other
aacggaggcaggttggagccgctgccgtcgccatgacccgcggtaaccagcgtgagtncgcccgccagaagaatatgaaaaagcagagcgactcggttaagggaaagcgccgagangacgggctttctgctgccgcccgcaagcagagggactcggagattcatgcagcagaagcagaaaaaggcaaacgagaagaaggaggaacccaagtagctttgtggctttcgtgtccaaccctcttgccntcgcctgtgtgcnggagccatcccaccncgctcgcgtttcctctgtagt

SEQ ID NO: 6135 - DNA, 285 bp, Zea mays
  misc_feature: Incyte ID No: 700383070H1
gtgaaagttcaacaaattatagtcgatgctggaatttacttgtcagggaggaccaacttctttcgaggaacacagaaacgagcagctcctgaggcttttaagttctttacaggcatttcttgctctctgtgcttgctttgttttcattggtcttaataatttcctcaccaatttatctcctccgtaataggttctccagggtcatattaaaccggcaatttatagagtactgcatcttgctgggagaatctccctaggattctctcagtacttcaacaagtatac

SEQ ID NO: 6136 - DNA, 293 bp, Zea mays
  misc_feature: Incyte ID No: 700383071H1
  unsure 61: a, t, c, g, or other
gtaagaactatgctgaatgggttgttaattctgagtatgactggccacaacactgttcgtncttgcaattcctgttctcgaaggtggaactgaagaaacaacacgattgggttgcttgcatgtggtacacaccaaatgcttgatatcacatatccaaagttttcctacccaaacagcaccagatggatacgtctgcccctcctgttctgcacccatatggccaccttctagcataaagatacaggttcgcgcttcacactggaactgaagaagcgatagtccagactggatgg

SEQ ID NO: 6137 - DNA, 295 bp, Zea mays
  misc_feature: Incyte ID No: 700383072H1
  unsure 2, 6, 76, 92, 163, 202, 239: a, t, c, g, or other
cnggcngcttccgctccaagcttcagccaagccggagatggcggggagcctgcaccttcccgtggtggacctcgcnttgccggacctccgcnccgccgctgaatccatccgacaggcgtgcgtggagcacgggttcttctacgtgaccaaccacggagtgganccgcggcctgctcgaggcggtgttcgcggagagcaagangttcttcgacctgcctatggaggataagatggcgctnctcaggggcgcaaaccaccggggttacacgccgccctacgccgagaagctcgacgc

SEQ ID NO: 6138 - DNA, 293 bp, Zea mays
  misc_feature: Incyte ID No: 700383073H1
  unsure 2, 8, 101, 122, 152, 155: a, t, c, g, or other
gngatggngcatctctcgggacaactggcacaagcgccgcaaaaccgggggcaagagaaagccctaccacaagaagcggaagtatgagttggggcgcccanctgccaacaccaagattggcncccgccgcatccacacagtccgtgtgcggngangtaacaagaaataccgtgccctgaggttggacgtggggaatttctcctggggctcagagtgttgtactcgtaaaacaaggatcatcgatgttgtctacaatgcatctaataagagctggttcgtaccaagacctggtg

SEQ ID NO: 6139 - DNA, 287 bp, Zea mays
  misc_feature: Incyte ID No: 700383074H1
  unsure 86-106, 144, 258: a, t, c, g, or other
ttccagggtgacataatgcatttaaatttgggatttgggtggagtattatgtttaactggagttgtcaagtatgagtccctcaggnnnnnnnnnnnnnnnnnnnnnaaaaagcaatctgattcttagctcttgaaactattgcnacttaaatttccaataattaaaaatttaaaatttttaaattagaattgccaatacttctacatttgagaagggtttttttagaaatactttagtaaagtccccaaggacttagnctactttaaactttttcttaaaacaggtt

SEQ ID NO: 6140 - DNA, 283 bp, Zea mays
  misc_feature: Incyte ID No: 700383075H1
  unsure 11, 278: a, t, c, g, or other
cgtactatgancaggtccttgtgcaccagtgccatgctcggcgctgtccccgcacgctactcatggactggaggagagattgggtttgacacctacttctccatggccaggggcaacgccactgtccctgctatggagatgaccaagtggtttgacaccaactaccactttattgtccctgaattgggcccaaacaccaagttctcctatgcttctcacaaggctgttaacgaatataaggaggctaggcgctcggtgttgatacgtgccagtattgntggac

SEQ ID NO: 6141 - DNA, 293 bp, Zea mays
  misc_feature: Incyte ID No: 700383077H1
  unsure 107, 162, 186: a, t, c, g, or other
accgcgatggctcccaagatcctagtcatccttgtgttcctcgccgtggcctcaccggcggctctggccgcctttcgatgtgatagagatgctggccgacaagcccncgtactccacgttcctgaagctcctgcaggacaccaaggtcgcgggcgaggcganttcagctccggtcggcgacgctantggtcgtccccgacaaacttgccaagcctctggcgtcgctgcccgccgataaggtgcggccggcggtggagaaccacgtccttctcagttattcgaccccatcaagc

SEQ ID NO: 6142 - DNA, 289 bp, Zea mays
  misc_feature: Incyte ID No: 700383079H1
  unsure 10: a, t, c, g, or other
agcataagtncctcccttctggtcggcgccgtgttccatcaagtatacatgttccacaaggagattcttctggactacgtgcaccatgatatcaccagaaagtgggctttgatttacttcaagctgcttttgctggtgatggcgaaggacaccatcatgtacttcaatctgttctaagctcaccttctcagtttctcaaatatccagcaatgcatccgtctctgcactcgtagaataatgatgatggatgaatatgcagcctcgttctgtatctccctatgagctgctt

SEQ ID NO: 6143 - DNA, 298 bp, Zea mays
  misc_feature: Incyte ID No: 700383081H1
  unsure 12, 52, 85, 89, 214, 281: a, t, c, g, or other
tcctccagaganaaatctatggagaaatcatgcagttcggcacacagggganaaagaaccttatggggccgtacttcagcaaganaagncctgtcaacagaggagattgaatgctgcagtgatgatgagtccctattgagaaacttgagagcaacaaggttgatctccaatcgaaaattgcaaaggaggccaaagaaaatgctattctacagtncaagtctagaaaagcggaaagaagaactacatgagcgccgtttagcacttgaaaaggaagttgaaanttgagggagcagctgca

SEQ ID NO: 6144 - DNA, 296 bp, Zea mays
  misc_feature: Incyte ID No: 700383083H1
  unsure 66, 123, 168: a, t, c, g, or other
cgccgacgccgcgccgccgcagcaactgtcaccgtcgctatggcccgtatcaaggtgcacgagctnccgggggaagagcaagacggacctgcaggcgcagtcaaggagctgaagtctgagctntccctcctccgcgtagccaaggtcaccggcggcgcacccaacaanctctccaagatcaaggtggtgcgcacctctatcgcgcgcgtgctcacagtgatctcgcagaagcagaagtcggcgttgcgggaggcgtacaagaagaagaactgctccccctcgactccgccctaaga

SEQ ID NO: 6145 - DNA, 287 bp, Zea mays
  misc_feature: Incyte ID No: 700383084H1
  unsure 177, 181, 185, 215, 227: a, t, c, g, or other
aggcaagggcgcaaccaataatagcaagtgtgatcatccgttgatccatcttgctaataaccctgcgtgcccttcgttctcgtctcgatcccgacgacgctcccttcggctccggcaaaccacatcaagtcgcgatggagatgaagaaggtcaccagcgcctcctcggccgcgttcncggncgtnggcgccgtgctgggcgcctccgtgctctcntcttcgcctacnacctgcagtaaattaaaggaggtcggaggagatgctgctggctgccatgcctgtattcgg

SEQ ID NO: 6146 - DNA, 285 bp, Zea mays
  misc_feature: Incyte ID No: 700383086H1
  unsure 264, 267: a, t, c, g, or other
gaagattctttgtgacaccgtcggactctgttgccattatcgcagccaatgctgttcaatcaattccttactttgcttctggcctgaagggagttgccaggagcatgccaacatctgctgctcttgatgttgttgcaaagaatttgaaccttaagttctttgaggtgcctactggatggaagttttttgggaattgatggatgctggaatgtgctcaatctgtggtgaagaaagcttggcacgggtctgaccacatcgtgaganggngggcatctgggctgtgct

SEQ ID NO: 6147 - DNA, 248 bp, Zea mays
  misc_feature: Incyte ID No: 700383087H1
  unsure 30, 97: a, t, c, g, or other
gggccgtctctggagagcagcagccatggncctacgctaccctatggccgtgggcctcaacaagggccacaaagtgaccaagaacgtgagcaagccnaggcacagccgacgccgcgggcgtctgaccaaacacaccaagttcgtgcgggacatgattcgggaggtgtgtggctttgccccgtacgagcggcgcgccatggagttactgaaggtctccaaggacaaacgggcactagttctagatcgcg

SEQ ID NO: 6148 - DNA, 189 bp, Zea mays
  misc_feature: Incyte ID No: 700383091H1
  unsure 2, 141: a, t, c, g, or other
gnggaattgctcaagaataaggcggcactaggaattgctcaagaataaggaagcgccccatgttaagcaaagctgataaaaccatggcgatatgtgagtgacctttttatcggaaggaaaattgtttgcatgcttatgtanctgacctcaatttttacgtattggagtgatttgatgtgaaatttaacc

SEQ ID NO: 6149 - DNA, 288 bp, Zea mays
  misc_feature: Incyte ID No: 700383092H1
cgaataagggaggcagtggggttgttcaggctcctgaaatctctagaatgaagagcgctgcaccatcagttgggcgctggattctcagaacagaaattcccaaggtgtacatccatggctatgccttttgcttccaagctgctgaccctgcataggtctggactctgtagggcgtggattttgctggtatattggttatcatcaagctgcgtcccctgcatcatccccgaaagacatgaggagaaacaaatccataggtctgacaggttgggttcgaggtagattatt

SEQ ID NO: 6150 - DNA, 296 bp, Zea mays
  misc_feature: Incyte ID No: 700383096H1
  unsure 35, 107, 244, 248: a, t, c, g, or other
tcgcgagcggcggcagcacgaggggaaaagagctnagcggagaccaaagtcagccgggagacagtgggtctgtgagagaccgaatagaggggctggggccacgagcnccattgacaagcaatggggaagaaacagaaaaacaagagcgaagacagcaccaaggatgacattgatcttgatgccttggctgcagaaatagaaggagctggtgctgccaaagaacaggagcctcaaaagtcaaaangganaaagaacaaagagaaaaaaaagcaggatttgatgaagatgatatctga

SEQ ID NO: 6151 - DNA, 256 bp, Zea mays
  misc_feature: Incyte ID No: 700383103H1
  unsure 235, 237: a, t, c, g, or other
tcgccgtccgaagctccgcaccccaatctaattcgacacctcaccgagatgggccgcaagttcttcgtcggtggcaactggaaatgcaatggaaccacagatcaggtcgagaagattgtcaaaaccctgaatgaaggacaggttcccccttcagatgttgtggaggtcgttgtcagccctcctatgtcttcctcctgtggtcaagagccagctgcgccaagattccagttgctgntnagaatgctgggtgaagaag

SEQ ID NO: 6152 - DNA, 296 bp, Zea mays
  misc_feature: Incyte ID No: 700383104H1
  unsure 60, 77, 185: a, t, c, g, or other
cgcggagtggaggtcgaccgacattgaattccctctttccttctttgccgctcaattgcncccttgttccgcgggangctggccaccggtcctgcctgcgcaatccattttgttcgtactattattgtgtaaccattgtgctccgtggagccgtagaggtggagatctgggttgccatttccagncccctggccgcgtccgctgcgatgggtcgaagcgtctgggcggttccgttggcttcccttcttggcgtttggtttggtgctcggctccgtcgaggccagcctcggggatgt

SEQ ID NO: 6153 - DNA, 293 bp, Zea mays
  misc_feature: Incyte ID No: 700383106H1
  unsure 106: a, t, c, g, or other
tgctgactgaagccaaaaaggagatcgattccttttccaagggaggtcccatttcgtttgcagatctgatccagtttgcagcacaatcagcactgaagagatcgtntcttgacgctgccattgccaaatgtggtggaaatgaagagaagggaagaacactgtactctgcatatggttcaaatgggcagtggggtctgttcgatagaacgttcgggagagcagacgcacaggaagcagatccagagggaagagtgcctgactggagcaaggcttctgtgcaggagatgaaggta

SEQ ID NO: 6154 - DNA, 282 bp, Zea mays
  misc_feature: Incyte ID No: 700383111H1
ggtgatttgataaagtgggataaagccaaggttggctactatgtaggggttgatattgctgaaggctcgataaaagattgcatgactcgctacaatggtgacacagatcaacaaagaaggaaaaggttcagtttccctgcacggcttatttgtactgattgctatgaggctcgtttggatgaatatttatatgaggatgctccgtttgatatatgtagctgtcagtttgcttacactattcaggtcaactgaagcacgcgctagacaagccttggcaatgtg

SEQ ID NO: 6155 - DNA, 286 bp, Zea mays
  misc_feature: Incyte ID No: 700383115H1
  unsure 2, 6: a, t, c, g, or other
gncgcngagtcgcgcggaggcggaggcttgggtgcgttcaagattcaacttcacccgtaacccaccgccatggccgaggaaggcattgctgctggaggtgtaatggacgttaatactgctttacaagaggttctgaagactgccctcatccacgatggcctagcacgtggaattcgcgaagtgccaaagccttagacaagcgccaagcccatctttgtgtgcttgcatcccaactgtgatgagctatgtatgtcaagttggtggaagcccttgtgctgaacaccaa

SEQ ID NO: 6156 - DNA, 296 bp, Zea mays
  misc_feature: Incyte ID No: 700383116H1
  unsure 212, 235, 243, 249, 256, 269-271, 273, 283-285, 289, 291, 293: a, t, c, g, or other
gctagcactcctaatggaaataagaagctggatgctgggtaccgagaggctcaggagaaatccaatgactgcccggtgttcttgtttttctctgtgaacacaagtggtcagtttgttggtgttgctgaaatggttggtcctgttgactttgataagactgtggagtattggcaacaagacaagtggaatggttgttttccactccaatgggnactaatccaggatgtgcccaacnaacacttngagccntttaccncgggtaacaaggnnnanaagcctgggnnnaacngncnggg

SEQ ID NO: 6157 - DNA, 295 bp, Zea mays
  misc_feature: Incyte ID No: 700383117H1
  unsure 162, 186, 215, 286: a, t, c, g, or other
agctcctcctcgcgattccaatccacgcacgccatctccgactccgcgtccgccttcgcgcaggacatatattcagtgatggaacacaaggaggccggctgccagcagccggagggcccaatcctatgcatcaataactgtggtttctttggaagcgctgcnaccatgaacatgtgctccaagtgnccacaaggagatgataatgaagcaggagnaggccaattggctgcctctcaatcgatagcttgtcatggcggtgataatgggaaggacttgcaattgctgnaactgtagg

SEQ ID NO: 6158 - DNA, 293 bp, Zea mays
  misc_feature: Incyte ID No: 700383118H1
  unsure 2, 155, 230, 245, 266, 270: a, t, c, g, or other
anatcctgcctggtggaggacaatgtttggaattgctgtagttccatccattctgctggctgtaggaatggccttttcgcctgaaagccctcgttggctattccagcaaggaaaggttactcaagcagaattagctgtaaaaagactgtatgganaagaaatggttaccgaaattatgtttgatctgagagctagtggccaaagttcttcggagtccgaagccggctggnttgatcttttcagcnagcgttactggaaattgtgantgtnggggcagcatgtttttgttccgc

SEQ ID NO: 6159 - DNA, 297 bp, Zea mays
  misc_feature: Incyte ID No: 700383119H1
  unsure 20, 47, 53-54, 56, 58, 63, 70-71, 73, 82, 86, 89, 95, 98, 100, 107, 130,: a, t, c, g, or other
gtccgcagcctcctcctctncgcagatccccacctgtaccgcagcangcaacnncntngctcncctcggnngncaggatganagangcnccattnctncngcgtganatgctcttcaagcagcaacattncttccagaacttgaccaagcacacctacctgaaagggacgctacgacgtgatcacatctgtcgccatcccccttgcactcgctgcctccagcttgtncatgattggncgtggagtttataacatgtctcatggggttgggaagaaagagtgnatctccactggttaa

SEQ ID NO: 6160 - DNA, 291 bp, Zea mays
  misc_feature: Incyte ID No: 700383121H1
caaggagcgccatcttgcctctgagggtgtcgaatacgcaagaagagtaatcgcctgtgccgaatcatcggatcctcatctgaagagcgtcggcctccatttcttggggagctgtctaggcaacaagtccaaggtcgtttcgtcggactaccaaagatctctgctgcagacggagactctcaagtcgcttgcagagtcgattggccttaaccgctacaacgccgacctcatattcgacatgggagttgagtacgccgagcaaaggaactgaatgccgccctgagatgcgcc

SEQ ID NO: 6161 - DNA, 288 bp, Zea mays
  misc_feature: Incyte ID No: 700383122H1
ctgacatacttccagcttgctgctgaagaccatgagtggtggtggaggtcattcctatgcggaggatcaactggatttttcgtatacggctactgcctgtactactactatgcgcgatcggatatgtctggcttcatgcagacatctttcttctttggctacatggcctgcatctgctatgcattcttcttgatgcttgggatggtgggctccgtgcctccttgttctttgtccgccacatatacaaatctatcaagtgtgagtgagctgttgttggaagatcaagag

SEQ ID NO: 6162 - DNA, 285 bp, Zea mays
  misc_feature: Incyte ID No: 700383125H1
  unsure 6, 13, 18, 22-24, 27, 34, 36-40, 43, 45, 53-54, 90, 96, 125, 135, 137,: a, t, c, g, or other
ggcagntaagatncgatngcgnnnatngcatctntnnnnntanantggcgtanntcctgctgtccagcctctcccgctgctcagccgagncctgcntggagccccagatcaccccttcctactanacaacttctnangcngtnattncaaangagaccgtcttcattgtggagatctccctganatgcaagaacagggtccagaacatggctctctatgctgacgtcgtggaaaacaantcccntgtcactcgaagccangatgtggggcgttancaggcnncng

SEQ ID NO: 6163 - DNA, 290 bp, Zea mays
  misc_feature: Incyte ID No: 700383126H1
  unsure 29, 129, 268, 286: a, t, c, g, or other
gataaaataaaatctttcaattacctgcntccggcagcggtacgatggccgcttcgagaatggcgctcgtactcttgcgcccgccgcctcccgtccttaccctctccgctcaccctctcgaggccccgngccggcgccgtctcatttctggctgcccaaccgtcgccggcgacgcaaccgagatccggcaggaatcttgctctcttctgttctttatcaccgacgtcgccatcgctaactgaggccgccgtagcactgccgccaccgnaagctgcggtggaagagncgaa

SEQ ID NO: 6164 - DNA, 283 bp, Zea mays
  misc_feature: Incyte ID No: 700383127H1
  unsure 258: a, t, c, g, or other
acgggaggccgtcatccccatcctcaagcccaagctcgtcatgcgcctcgcgtatctcatagagcatgaagctgatcggaacgagttcctgaagctgtgcaagaaggtggagtacaccatccgggcctggtacctcctccagttcgaagacctcatgcaactgtactcactgtttgatcctgtttctggtaaggagaggttacagcaacagaacctgacgccggaagaaatcgagaccctcgaattcatttcatgacnatctttccagtgatgggaaaaagca

SEQ ID NO: 6165 - DNA, 288 bp, Zea mays
  misc_feature: Incyte ID No: 700383128H1
gaagggcgtcaagtgcggcccgggccacggcatcagcgtcggcagcctggggcggtacaaggacgagaaggacgtggaggacgtgaaggtgacggggtgcacgctcgccggcaccaccaacggcctgcgcatcaagtcgtacgaggactccaagtcgtcgctcaaggccaccaagttcctgtaccaggacgtcaccatggacaacgtctcctaccccatcatcatagaccagaatatgccccaacaacatctgcgtcaagtccggcgcctccaaggtggccgtcaaga

SEQ ID NO: 6166 - DNA, 282 bp, Zea mays
  misc_feature: Incyte ID No: 700383129H1
  unsure 77-78, 114: a, t, c, g, or other
ggggccaaggggagccagctcgagaccaacaagaaggccatgagcatccagtgcaaagtgtgcatgcaaacattcanntgtaccacgactgaagtgaagtgccgggagcacgcngaggctaagcatcccaagacagacgtgtaccagtgtttcccccatctgaagaagtgaaaggcctgaacttagcaaccagcgctggtttggtcattacgatcgggccaggggcgttcctgtgttgagggtgttcatccgtgttatcttcccgtcatcatgcgtctgtcc

SEQ ID NO: 6167 - DNA, 289 bp, Zea mays
  misc_feature: Incyte ID No: 700383131H1
  unsure 40, 47, 51-53, 55, 57, 62, 77, 88, 92, 94, 116, 125, 174, 176, 189, 192,: a, t, c, g, or other
gatcctcaccggcgtcgccatcgtaatcgccttggacagnggctgcntctnnntngnctttngctggggataacctntggaacctacngctngnagatttagtggttgggcttganttcctactnttcagaaacacagtaccgagaagtctttaggtggggtcaaagatggtgnanctgaagttgcaanaancggctgccgcganctacctcaatgtgggaaaggcaaggtgtggcttgacccaaatgaattagtgagtcnccatggcaaattcccgccagantatccg

SEQ ID NO: 6168 - DNA, 290 bp, Zea mays
  misc_feature: Incyte ID No: 700383135H1
tgatatacgagtacatggaaaatgggagccttgagatgtggctcaggaaccgggctgatgccatcgaaacacttggatggccagaccgcctgaagatatgtattggttctgcccgcggtctttcgttcctgcatcacggttttgtgccccatatcatccaccgtgacatgaagtcaagcaacattctattggacgagaactttgagccaagggtctctgattttggccttgcaaggataatcagtgcatgcgagactcatgtcagcactgacattgctggtacatttggc

SEQ ID NO: 6169 - DNA, 291 bp, Zea mays
  misc_feature: Incyte ID No: 700383136H1
  unsure 74, 79, 88, 214: a, t, c, g, or other
ggaaaagataaggcgaacgatgtccacctagaaaccctagttcgaacgcaccgccgtcaccgtcgtcgctcgcnctctnccgcccggntcggagcgagagtaggggcgtgtcggcggtgaaagcgactgcgtcagccatggcggacgaggagcattcggagaggagagaggaggcctccgagcttgcccccttcgacccgaccaagaagaaganaaagaagaaggttgtcatccaagaaccttctgatgaagtggacaagcttgcagagaagacagaaacatggcagtcgc

SEQ ID NO: 6170 - DNA, 290 bp, Zea mays
  misc_feature: Incyte ID No: 700383137H1
  unsure 34, 37, 45, 100, 130, 206, 219: a, t, c, g, or other
caagtcgcctccccctactgtaggccgctgctgntcntctcctcncatctcaccacacaccgcagccccagcaagatacgcgcggaggccatggcgaagncaagccttcctccgccggcgccaagccgancgcggctgccactgcgcctgcgccgccggttacagtgcactcggcgctggtcacctacacctccatgctcgcgctnctctccctctgcncgcacttcgtcatcctcctgtggtacacgatggtgcacgcggacggatcggtggtgcggattacgagcact

SEQ ID NO: 6171 - DNA, 290 bp, Zea mays
  misc_feature: Incyte ID No: 700383138H1
  unsure 15, 200: a, t, c, g, or other
ccctcaccacagccncccacgccatggccgaggagaccgacaccaggcctgcctccgcgagctcccgaggccgccccgcgcccgaggacgacgacagggaggagggcgagatcaccgacatcgcctgcgctccttccccgcccgccacgcacccgctcgagcactcctggaccttctggttcgacaacccgcagagcaantccaagcaggccgcctgggggagctccatccgcccaatacacaccttctccaccgtcgaggaattctgggggctttacaataacattatc

SEQ ID NO: 6172 - DNA, 285 bp, Zea mays
  misc_feature: Incyte ID No: 700383139H1
  unsure 54-55, 273: a, t, c, g, or other
gggagatgtccattggagacagaagtggagagagggagaagttcatttgtcctnntatttatgtatggtgcacctaactgtgtgccaagccatgttagagatacagtgggagcaaaaccagatgtgttttctgccctctgactccagtggttgcagaattagcccaggaactagaattggatggagtcacacaaaccaaggaaggggattgtttgaggggggcactcagtcacatgtggctgaggccaaagagaatgaagatatattttaaantctggattggca

SEQ ID NO: 6173 - DNA, 292 bp, Zea mays
  misc_feature: Incyte ID No: 700383140H1
  unsure 233-235, 243, 273, 277, 281: a, t, c, g, or other
gtccgtgtcaagcgtggcggcaggaagaggcctgtgccgaagggtattgtctatggcaagcccaagcaccagggtatcacccagctcaagttccagaggaacaagaggtctgttgctgaggagagggctggacgaaagcttggtggactcagggttctcaactcctactgggtgaatgaggatagcacctacaagtacttcgagatcatcctggttgatgtggctcacaccgnnntccgcaangacccaaagaatccactggctatgcatccngtgncacnaaccaccgtga

SEQ ID NO: 6174 - DNA, 204 bp, Zea mays
  misc_feature: Incyte ID No: 700383142H1
  unsure 61, 64, 164: a, t, c, g, or other
cagaagggaaatgatcaggcgacaacccggcatggatcggttcctgcagctgctggccgcnggngtggccgtagctactgctagtggcaccgccggccttggctgacgacgacattgtagaagtcggcgtcaactggggttcgcagctctcgcacccgcttctncccggctccgtggtgaagccgctcaaggcgaaccgcatcg

SEQ ID NO: 6175 - DNA, 280 bp, Zea mays
  misc_feature: Incyte ID No: 700383143H1
cctcggagggcattcaaggcctgccttttatgcctcatccagcaagcccccaagctgttttaattgatccttttagaaagggtcttctggaccagatagaatactatttcagtgatgccaatttgtgcaaggacctatacttgcggcaacgcatggatgaccaaggttgggtgccattacccctgattgctgggtttccccaggtccagaagattactaacaatattcagtttatcttggaaacagtcatgctatctaacgttgtggagtgcagggcgac

SEQ ID NO: 6176 - DNA, 285 bp, Zea mays
  misc_feature: Incyte ID No: 700383147H1
  unsure 2-3, 55, 210, 232: a, t, c, g, or other
gnnaatgaagggcaactcgtgcaagctttttggaatccatctcgacagcccagcnaaatctgaacctttgaagtctccgccaagcgttgccacaccggcagctgagaagtggatggcagacggaatcgacacagacaaaagctccgagccgcacaagacgccaaagcaactcggtgctacacagacacaggtggatcctgtcccagaganatgcccacaagcttcaagaggnacacagtgcaaatcacaaggcgggtcgattaggagtgcaagaaggtccacaag

SEQ ID NO: 6177 - DNA, 290 bp, Zea mays
  misc_feature: Incyte ID No: 700383148H1
  unsure 206, 208, 219, 238, 240, 287: a, t, c, g, or other
caagcatccttagaggagaaggaagatgaaatctctctgttgaggaggaactataatagtggtggttatggaaacaagaatgtagttggtactagtacagctggttcccctcatgaagagatgtcagaaaactatgaagaatcctcggcctcgagtagcatgatacagggttttgattcctcggtcctcaagttcagtgaaatctntncaagaggtggnaaattccatgaatctctgngnatcaaccatacagaggatcaggaggttttggtgactgaggaagagtntcc

SEQ ID NO: 6178 - DNA, 291 bp, Zea mays
  misc_feature: Incyte ID No: 700383149H1
  unsure 283-285: a, t, c, g, or other
agcacctcctcttcccccgccgggcaacaactcagccgccgcaaccgccacatcagccatgggcgcctgcgcaaccaagcccaagacgcttgaggggcaggccccagctgaggccgccgtctccacacccaaggttgcgcccgaggccactccaatctccgttgaggttgcggctgatgaacaggtagctgagaaggtggtggtggaggagccggctgcggcggccgacgttgagcatcagaaggtaatgaggtgctcgtccagaggcggccgtcgcgaaccnnnacaaaa

SEQ ID NO: 6179 - DNA, 293 bp, Zea mays
  misc_feature: Incyte ID No: 700383150H1
  unsure 250, 255-256: a, t, c, g, or other
caatcacttctcaccgtccaaccgtgcacaatgaattgaagcgccacgcggttccaataatctattgccacgggcaggtgcgtcgcgtcgattcctggtcttcgagaggagcggaggaggagggcggcgagtgcggaggagaggcgagttccgctgtagcgtttcgcttcttgcccgtggcggcggcggtgccaccttcgaacgctgctccctgttctggggcttactgcggatcctgatctgagcatcnattcnngagaggaagaaatatgtttaggagaaagcatggctct

SEQ ID NO: 6180 - DNA, 284 bp, Zea mays
  misc_feature: Incyte ID No: 700383151H1
  unsure 2, 19, 111: a, t, c, g, or other
cnagcattcctcgattggnaggtcaaagagcagctccagaacataaaatctgaaatagctgatgcgtctgctaatcctcaaggtctacttctggaggcccttcattcggtnggatattccggggcactggcaaaacctttgatggcttcagaatctgctgtaaaccggttggatgttagcagcttggaggaatttgttgctgaacattacactgctcccaggatggttctgcagcatcaggagttgatcatgatgcgctgattcattgtagaaccacttctgtc

SEQ ID NO: 6181 - DNA, 286 bp, Zea mays
  misc_feature: Incyte ID No: 700383154H1
  unsure 27, 32: a, t, c, g, or other
atggatccaaaatatgttagcctatgncatcntcgtattacttgtattgcatggagatactactttggcagaaacttgcagggagtttgctaaatggcatccattctgctttagtgcaatgtgcaaggcaaattgttttatagaaggaaaaagctccgatggttcctatgcaaagggatatagatgttaatcacatggatttcattctatgtgtatttgccttttgtgtaaaagttagttatcttaagacaagcggggatatattctatgttcatatccgtcattt

SEQ ID NO: 6182 - DNA, 286 bp, Zea mays
  misc_feature: Incyte ID No: 700383155H1
  unsure 18, 248, 266, 268: a, t, c, g, or other
ctcctcaattcgattggntccgtgtcgacctccaggttgagaaggaaagcatcgcgagttcgccatacggatgggttccaaagcgcctttctgtctcacgctcctcttgctgctcgccgcggcctgtggacctgctgcacatgccaacgatgctgtcttgaaggaacatatttcttcaaccaagattcctgcccgtctcaagaggggcagcggactatgctcggcctgtgaaaacttcacgagcgaanccgttcacttatctcggnanggaacagacacaggacag

SEQ ID NO: 6183 - DNA, 276 bp, Zea mays
  misc_feature: Incyte ID No: 700383157H1
  unsure 29, 219, 231, 263, 275: a, t, c, g, or other
cgtactatgaccaggtccttgacaccacntgccatgctcggcgctgtccccgaacgctactcatggactggaggagagattgggtttgacacctacttctccatggccaggggcaacgccactgtccctgctatggagatgaccaagtggtttgacaccaactaccactttattgtccctgaattgggcccaaacaccaagttctcctatgcttctcanaaggctgttaangaatataagaggctaaggcgctcggtgttaanaccggccaatant

SEQ ID NO: 6184 - DNA, 284 bp, Zea mays
  misc_feature: Incyte ID No: 700383158H1
  unsure 36, 39-40, 42, 44, 249: a, t, c, g, or other
caataacccctctctcccttcgtcaccatcacatcnagnnancnatccaaaaatgtcgcgcgtcacagctgcggtgctcttctacatcctcgccgttgctgccctcagcgcggccgaggccccggcagagtcaccgaaggaaggcagtgctgccaaggcacctgagtctgccaagagaactgctgcccccgctgaagcacccgaagccgcatccacccccgtcgccgccgctgccccatcgcgtcgtcnaggaatctggtccagctacgcgccaaccaccgctt

SEQ ID NO: 6185 - DNA, 283 bp, Zea mays
  misc_feature: Incyte ID No: 700383159H1
  unsure 77, 250: a, t, c, g, or other
ccatcgatctccccccagcggcgaggagagccggcggccacaggaaggagaaatggcttccgcacacaacgctctcngggtgtttttcatcctagccgtggtatgtgccgtatgcacagcgaaaaggacaggagccaagaaggaagaatcggcggcagcccctggtggtgctgctggaggcagcggcgggacgttcgacatctccaagctcggcgcgaccagcgacggcaagacggattgcacaaaaggnattccaggacgctggagttaacgtgcgaagacc

SEQ ID NO: 6186 - DNA, 68 bp, Zea mays
  misc_feature: Incyte ID No: 700383162H1
  unsure 2, 7, 10, 12-13, 15, 27, 43: a, t, c, g, or other
gnaaagnacnanngnacagaaacgttnggtgattcttgacttngcagtatgcatccaacacaacatat

SEQ ID NO: 6187 - DNA, 291 bp, Zea mays
  misc_feature: Incyte ID No: 700383163H1
  unsure 199, 205, 211, 220, 269, 283, 285, 287: a, t, c, g, or other
gatcctcaccggcgtcgccatcgtaatcgccttggacagcggcaccagaacctcctgcctccgcagggtgcttgctggtatcattacaatctggtagttttagtggttgggcttgacttcctactattcagaaacacagtaccgagaagtctttaggtggggtcaaagatggtgtcgtgaattgcaaaagcgccttgcngcgagnacctcnaatgtgggnaaggcaagtgttggcttgaccccaatgaataagtggaatccccagggcnaaactcccgccaanantnccgg

SEQ ID NO: 6188 - DNA, 289 bp, Zea mays
  misc_feature: Incyte ID No: 700383165H1
  unsure 3, 64-65, 91, 93, 98, 108, 163, 169, 191, 193, 196, 205, 210-211, 215,: a, t, c, g, or other
ganacatgaaaaacccttcaaaaaatcagtgaatccaggagctgttttttgaaaagattaagannatagactgctagcttgactaaacaangnagaanagagagaagntcaaatagacacaataaaaaatgataaaggggatatcaccactgatcccaatganataganactgccatcagaggatactatnancanctctacgcnataanntagnagtnntgnangaatgnatncttcccggaacactncncnttcccaggcntaagcggggangantgantcctgaac

SEQ ID NO: 6189 - DNA, 292 bp, Zea mays
  misc_feature: Incyte ID No: 700383166H1
  unsure 46, 266-267, 278, 289: a, t, c, g, or other
gcctcgtcgcctcagctccaccaccaccatcctccacccgcgcctnccaaaatccaaatccgatcgatctccgcggcctccagatcccccggcgggcggagacggcgagctccaggcggccaagaagcccccccctcgcagcgctcctctcctctgcctctccgaatcccttaccagggggaaaaaacattgcctgaaagttcttcaggccctggtgtagcagctgaattacccatttaatggcgaagaacgagctttagatggtnnaaagatggagntgagatagaancac

SEQ ID NO: 6190 - DNA, 283 bp, Zea mays
  misc_feature: Incyte ID No: 700383167H1
gaaagagcagaacgtctttgagaccctgattggcaagcagcagcagatcctgctggccactcaggtggtgaagatgatcctgaagatcgacgacgtcatctcaccgtccgagtactgatgaagcctgaaggaaggaggaaaaaaaaagagaggaacaggtggctatgctggatgagagtttagtaggcagcattgctgatgtgttgattggtttactcctgttcaggcgtgctccttgtatctatgagctgcctagcaccttttgtgtgagggttgtttgtat

SEQ ID NO: 6191 - DNA, 285 bp, Zea mays
  misc_feature: Incyte ID No: 700383169H1
ccttctccgtcctgccctgcagcagcaagccgtgccaggagggcacgttcaccaacaagacctgcaccgacagcaggtgcgcgtacgagaacgactacggcatcatgacgtccaccggcgtgctcgcgaccgagacgttcaccttcggggcccaccaaaacttctccgccaacctcaccttcagctgcggcaagctcaccaacggcaccatagccggggcgtcgggcatcatgggcgtctctccgggacccctgtccgtgctgaagcagctgtccatcaccaatt

SEQ ID NO: 6192 - DNA, 284 bp, Zea mays
  misc_feature: Incyte ID No: 700383170H1
  unsure 22, 32, 34-35, 41, 44, 78, 82, 95, 104, 113, 129, 137, 140, 148, 159,: a, t, c, g, or other
gggttactattaatcagctggntccaagatancnntttgcnagnaatgagattccataatccaaagattgtttctctnctanaacgtttacggtnctacattcnacggatacntcccaacttggagaangtggtgtntcntgatgacnatgttgtggtncaaaaggatttgantcagctgntctccatagagcaacatggnaatgtcattggagcagtgganactgtntaaagtcgtttcatcggnatcacaagnntctaaatnnntcgcatccnaatatnagc

SEQ ID NO: 6193 - DNA, 281 bp, Zea mays
  misc_feature: Incyte ID No: 700383171H1
  unsure 6, 32, 66, 71-89, 96: a, t, c, g, or other
ttcggnttctcccaaatcccggcacggcggcncgggacctctccctctctctcccgctggcgggcnatggnnnnnnnnnnnnnnnnnnnacctgcncccgccttggccggggaggcgctacgccagaaacgcatcctctccagcaagctctacctcgaggtcccgtcctccaaggtcggtcgcgggcatcgtcccatctctagcttccaagatacgcgcgagctgtccttgtttcgatcccaatgttttcttgcaggcgccggtggtttatcgccggcata

SEQ ID NO: 6194 - DNA, 295 bp, Zea mays
  misc_feature: Incyte ID No: 700383173H1
  unsure 2, 58, 109, 158, 173, 190, 199, 205, 208, 215, 224, 278, 288: a, t, c, g, or other
gngaaaatgacccaccaatggcagcagctggcttcactgctcaggtgattatcctganccatccaggccaaataagcgccggctatgcccctgtattggattgccacanggctcacattgcatgcaagtttgctgagctgaaggaaaagattgatcgncgttctggtagaaanctggaagatggacctanattcttganatctgntgnatgctgncatgttganatggtttcctggcaagcccatgtgtgttgagagcttctcagactatccaccttngggtcgcttngctgttc

SEQ ID NO: 6195 - DNA, 290 bp, Zea mays
  misc_feature: Incyte ID No: 700383176H1
ctaccagattttgtagagccatctaagacaaaagtcactactcttccaaatggcgtcaagatcgcctcggagacatcatcgagcccagcagcatctgtgggtctgtacattgactgtggttccatttacgaaacacctgcttcatctggagtgtcacatctgttggagagaatggccttcaagagcacagtgaatcggactcacttacggttagttcgtgaggtagaagccatggaggaaagtctctgcatcagcttccgtgaacaaatgagctatacctatgaggcatg

SEQ ID NO: 6196 - DNA, 298 bp, Zea mays
  misc_feature: Incyte ID No: 700383179H1
gcaaatgaagtattttttccctcttggcaacttgtgtcagagttactctggtctgagtcaactttcgctggggaaaacctatggaacctactgcaaaaagattgtccaaaatgcctaagaaaatactcctctgatgcatttagccttcaaccctacctgtcttgctgaagggagaaaaatgttttagtacattataggcccagcagcttttattcatgtccaccagctagttgcacagagaatcatgtgtacctaactaaggatgatctagggataagtaactcctgttttatattga

SEQ ID NO: 6197 - DNA, 239 bp, Zea mays
  misc_feature: Incyte ID No: 700383180H1
  unsure 8, 28, 30, 37, 49, 53, 92, 95, 98, 122, 125, 133, 135-136, 159, 166,: a, t, c, g, or other
cacagacncagagagaacccaccatggngntgtctcntgccgacaagancaangtcaaggccgcctggggtaaggtccagcgcgcacgctgngcnagnatggtgcggaagccctggagaggntgntcctgtcntnncccaccaccaagacatacttccngcacttngactgagctccggctctncccaggtnanggncnacggcagaaggtggcngangnnntgaccacgcgnggcnca

SEQ ID NO: 6198 - DNA, 289 bp, Zea mays
  misc_feature: Incyte ID No: 700383181H1
  unsure 147, 248-249, 252, 256, 260, 267, 278, 286-287: a, t, c, g, or other
tcagcttcttgtccatggcaagcgtgtcgaatgtagatgggtggtggagttcaatcggggaccaattgccgtactcagtccatgtgtatcatgagggttctctcctgggctttaatggccttggctgtggccaaaatgaacgggagncaaggcaccacttgaactccgtgccttgataaacatcgagcatctcgtcgccctcatccatgctgaccatcatcttgtcgtcctcgtccatgctgatgaanngcngccntgtnggattcngtttccaagancccctggnnaa

SEQ ID NO: 6199 - DNA, 288 bp, Zea mays
  misc_feature: Incyte ID No: 700383182H1
tccatatctccggaatggacaccctggcacgtggcctccgcaacgttgccaagctgattgaggatggttccctagatgatcttgtccgcaagcggtaccagagctttgatagtgatatcggtgccttgatcgaggctgggaaaggagactttgagacgctagaaaagaaggttctagagtggggtgagcccactgttgcatccggcaagcaggaactggcggagatctgttcccgtctgccctatagatggtgccatgtccataggtccaggaataagcaagggtgcg

SEQ ID NO: 6200 - DNA, 285 bp, Zea mays
  misc_feature: Incyte ID No: 700383185H1
  unsure 2, 4, 6, 52, 57, 71, 76, 82-83, 98, 112, 114, 134, 139, 142, 178, 180,: a, t, c, g, or other
cngntnccatgcactcttctttctagcacttttctcaaccaatggttttagnatcgnatgtctttattttnctaanggtatnncttatttcacagcanaaaacatgaggganangattaggtcaatgtcaatanctggnacncattagttgcttctacatatttgatgaatgactgantnagtggatggannangaggcagtcacctaanagnaggggtttccatgacctggggtcnatggatcagctnctaaataccctgncctctgagatcgnctgcantagt

SEQ ID NO: 6201 - DNA, 283 bp, Zea mays
  misc_feature: Incyte ID No: 700383186H1
  unsure 192, 194, 197, 202: a, t, c, g, or other
gccctccaatacttcttcctccctagatctcccccccacgcaacaaggatcgagaagaggaggaacaagatggattgaagaggaagagaggatcaaggagatgtgctaccaccatctcttgcagattattcttagggaaaaccctaggtgcttgttgttcatcaagggaagtgggaagtagcagcacatccncnttncactncctataataacgctgcttaggtgcagtcagatttaattagaagcttctgtccaaaggatgtttgtttctaatagttgtgcg

SEQ ID NO: 6202 - DNA, 275 bp, Zea mays
  misc_feature: Incyte ID No: 700383187H1
  unsure 170, 174, 185, 224, 239, 259: a, t, c, g, or other
acaaatgatgcctcaacattttgagctgctctgtcggacaaataacctggtcctcttgaggttatattttggatatacatttttaaactgtcagtaattattgtcagatgtggagttcaatagccagccagtgttcatttttatccttgagcttttagtaaaaacttccnggtnttatttttagncattgggtcatacaggcactaaagtctgctatttatggnaactaactttttgtntttaatccgggccaacatgnagtaaataaattttag

SEQ ID NO: 6203 - DNA, 281 bp, Zea mays
  misc_feature: Incyte ID No: 700383188H1
  unsure 4, 18, 196, 198, 202, 208, 214, 227, 235-236, 239-241, 255, 268: a, t, c, g, or other
aganacccgtggttaganatcacatccaaaacaacacggggtactcaataccaaacatagtacctatgatcagtagccccactgggagttgcagagatggtgaagatgtaagtgtgaaccaagaagggggtggtattcagtttgatatatcattgaaccaagagtttgacagttttgcgcataactttggtcaagntnccantacagnggctanggccacaaggagncacaacanntgnnncagatgtccatgtnctaaatgattccntgaagaaatgacc

SEQ ID NO: 6204 - DNA, 294 bp, Zea mays
  misc_feature: Incyte ID No: 700383189H1
  unsure 2, 39, 66, 253, 259, 267, 284, 287: a, t, c, g, or other
cnattccgaagaatagttttggtgtcgtgcttccaaagnttttaaattcgttgacagatgaccagnaactaaggatgttagagcttaactcatggcaaatcttaagattgctgcaagcacaagtgtctgctttctgccttgaagattgtattaatgtggagagcagtattgaacttgacatccttcctgaatctattgagcaaaagttatgttttttactttctaaagccatttcttctcatcagtcttcaangtctcnatcgaggntctgattccaagtccgntanaaccggg

SEQ ID NO: 6205 - DNA, 291 bp, Zea mays
  misc_feature: Incyte ID No: 700383192H1
  unsure 4, 46, 90, 129, 141, 165, 202, 204, 215-218, 223, 240, 246, 259, 263,: a, t, c, g, or other
agtncgtgtacacggtgtacgtgcggacggggtccatctggaaggncggcacggactcgaccatcggcgtgacgctgctgggcgccgacngcacgggcatccggatccgggacctggcggggtggggcngcctcatgggcnccggccacgactactacgagcgcngcaacctggacatcttcatcggccggggccctgcatnanccaggcgccgnnnnggtgnaactcaattccgacggnaaccgngcgcaacaaaggntggnantgnaataacntcaggccaagntnaag

SEQ ID NO: 6206 - DNA, 291 bp, Zea mays
  misc_feature: Incyte ID No: 700383193H1
  unsure 9, 89, 120-142, 242, 249, 290: a, t, c, g, or other
gcgccggcntcctgctcaccaggaacgttggcatctccgacagcctgcgccccgccaacccgctaggctacttcaaggacgtgccgctncccgtctgcgccgcgctgctcaagcagctgnnnnnnnnnnnnnnnnnnnnnnngtaaactataccacggcggcgtcgcggacatgctgcacaaaactacaacgatacagagcgaacgcatggcatggatagcagtatctacggcaacggcaanctcgagngcggccatcgacggggtcacgaaggcgacgggactaaaagnt

SEQ ID NO: 6207 - DNA, 290 bp, Zea mays
  misc_feature: Incyte ID No: 700383195H1
  unsure 81, 276, 288: a, t, c, g, or other
gggaacgcctccgtccccaggaagacaaggccgaggaggaccgatccaaggtcgacgacctccgcggcacccccatgagcntcggatccctcgaggagattatcgacgagagccacgccatcgtctcctcctctgtccggacccgagtactatgtcagcatcctctcctttgtcgacaaggaccagctcgagccgggatgctccatcctcatgcacaataaggttctttctgtagttggtatattgcaagatgaagttgatcctatggtatctgtnatgaaaattganaa
